United States Patent Application Publication US 2026/0234257 A1, published August 13, 2026 (application 19/652,551).

The application's sequence listing, which the Patent Office published only in electronic form, follows.

SEQUENCE LISTING (2523 sequences)

SEQ ID NO: 1 - protein, 8 aa, synthetic construct
GFTFNKYA

SEQ ID NO: 2 - protein, 10 aa, synthetic construct
IRSKYNNYAT

SEQ ID NO: 3 - protein, 16 aa, synthetic construct
VRHGNFGNSYISYWAY

SEQ ID NO: 4 - protein, 9 aa, synthetic construct
TGAVTSGNY

SEQ ID NO: 5 - skipped

SEQ ID NO: 6 - protein, 9 aa, synthetic construct
VLWYSNRWV

SEQ ID NO: 7 - protein, 5 aa, synthetic construct
KYAMN

SEQ ID NO: 8 - protein, 19 aa, synthetic construct
RIRSKYNNYATYYADSVKD

SEQ ID NO: 9 - protein, 14 aa, synthetic construct
HGNFGNSYISYWAY

SEQ ID NO: 10 - protein, 14 aa, synthetic construct
GSSTGAVTSGNYPN

SEQ ID NO: 11 - protein, 7 aa, synthetic construct
GTKFLAP

SEQ ID NO: 12 - skipped

SEQ ID NO: 13 - protein, 125 aa, synthetic construct
EVQLVESGGGLVQPGGSLKLSCAASGFTFNKYAMNWVRQAPGKGLEWVARIRSKYNNYATYYADSVKDRFTISRDDSKNTAYLQMNNLKTEDTAVYYCVRHGNFGNSYISYWAYWGQGTLVTVSS

SEQ ID NO: 14 - protein, 109 aa, synthetic construct
QTVVTQEPSLTVSPGGTVTLTCGSSTGAVTSGNYPNWVQQKPGQAPRGLIGGTKFLAPGTPARFSGSLLGGKAALTLSGVQPEDEAEYYCVLWYSNRWVFGGGTKLTVL

SEQ ID NO: 15 - protein, 249 aa, synthetic construct
EVQLVESGGGLVQPGGSLKLSCAASGFTFNKYAMNWVRQAPGKGLEWVARIRSKYNNYATYYADSVKDRFTISRDDSKNTAYLQMNNLKTEDTAVYYCVRHGNFGNSYISYWAYWGQGTLVTVSSGGGGSGGGGSGGGGSQTVVTQEPSLTVSPGGTVTLTCGSSTGAVTSGNYPNWVQQKPGQAPRGLIGGTKFLAPGTPARFSGSLLGGKAALTLSGVQPEDEAEYYCVLWYSNRWVFGGGTKLTVL

SEQ ID NO: 16 - protein, 8 aa, synthetic construct
GFTFQKYA

SEQ ID NO: 17 - skipped

SEQ ID NO: 18 - protein, 16 aa, synthetic construct
VRHGNFGNSYVSYWAY

SEQ ID NO: 19 - protein, 9 aa, synthetic construct
TGAVTSANY

SEQ ID NO: 20 - skipped

SEQ ID NO: 21 - protein, 9 aa, synthetic construct
ALWYSNRWV

SEQ ID NO: 22-23 - skipped (2 entries)

SEQ ID NO: 24 - protein, 14 aa, synthetic construct
HGNFGNSYVSYWAY

SEQ ID NO: 25 - protein, 14 aa, synthetic construct
GSSTGAVTSANYPN

SEQ ID NO: 26-27 - skipped (2 entries)

SEQ ID NO: 28 - protein, 125 aa, synthetic construct
EVQLVESGGGLVQPGGSLKLSCAASGFTFQKYAMNWVRQAPGKGLEWVARIRSKYNNYATYYADSVKDRFTISRDDSKNTAYLQMNNLKTEDTAVYYCVRHGNFGNSYVSYWAYWGQGTLVTVSS

SEQ ID NO: 29 - protein, 109 aa, synthetic construct
QTVVTQEPSLTVSPGGTVTLTCGSSTGAVTSANYPNWVQQKPGQAPRGLIGGTKFLAPGTPARFSGSLLGGKAALTLSGVQPEDEAEYYCALWYSNRWVFGGGTKLTVL

SEQ ID NO: 30 - protein, 249 aa, synthetic construct
EVQLVESGGGLVQPGGSLKLSCAASGFTFQKYAMNWVRQAPGKGLEWVARIRSKYNNYATYYADSVKDRFTISRDDSKNTAYLQMNNLKTEDTAVYYCVRHGNFGNSYVSYWAYWGQGTLVTVSSGGGGSGGGGSGGGGSQTVVTQEPSLTVSPGGTVTLTCGSSTGAVTSANYPNWVQQKPGQAPRGLIGGTKFLAPGTPARFSGSLLGGKAALTLSGVQPEDEAEYYCALWYSNRWVFGGGTKLTVL

SEQ ID NO: 31-32 - skipped (2 entries)

SEQ ID NO: 33 - protein, 16 aa, synthetic construct
VRHGNAGNSYISYWAY

SEQ ID NO: 34-38 - skipped (5 entries)

SEQ ID NO: 39 - protein, 14 aa, synthetic construct
HGNAGNSYISYWAY

SEQ ID NO: 40-42 - skipped (3 entries)

SEQ ID NO: 43 - protein, 125 aa, synthetic construct
EVQLVESGGGLVQPGGSLKLSCAASGFTFNKYAMNWVRQAPGKGLEWVARIRSKYNNYATYYADSVKDRFTISRDDSKNTAYLQMNNLKTEDTAVYYCVRHGNAGNSYISYWAYWGQGTLVTVSS

SEQ ID NO: 44 - skipped

SEQ ID NO: 45 - protein, 249 aa, synthetic construct
EVQLVESGGGLVQPGGSLKLSCAASGFTFNKYAMNWVRQAPGKGLEWVARIRSKYNNYATYYADSVKDRFTISRDDSKNTAYLQMNNLKTEDTAVYYCVRHGNAGNSYISYWAYWGQGTLVTVSSGGGGSGGGGSGGGGSQTVVTQEPSLTVSPGGTVTLTCGSSTGAVTSGNYPNWVQQKPGQAPRGLIGGTKFLAPGTPARFSGSLLGGKAALTLSGVQPEDEAEYYCVLWYSNRWVFGGGTKLTVL

SEQ ID NO: 46-50 - skipped (5 entries)

SEQ ID NO: 51 - protein, 477 aa, synthetic construct
EVQLVESGGGLVQPGGSLKLSCAASGFTFNKYAMNWVRQAPGKGLEWVARIRSKYNNYATYYADSVKDRFTISRDDSKNTAYLQMNNLKTEDTAVYYCVRHGNFGNSYISYWAYWGQGTLVTVSSGGGGSGGGGSGGGGSQTVVTQEPSLTVSPGGTVTLTCGSSTGAVTSGNYPNWVQQKPGQAPRGLIGGTKFLAPGTPARFSGSLLGGKAALTLSGVQPEDEAEYYCVLWYSNRWVFGGGTKLTVLGGGGSQVQLVQSGAEVVKPGASVKVSCKASGYTFTSYAMHWVKEAPGQRLEWIGYIYPGQGGTNYNQKFQGRATLTADTSASTAYMELSSLRSEDTAVYFCARTGGLRRAYFTYWGQGTLVTVSSASTKGPSVFPLAPSSKSTSGGTAALGCLVKDYFPEPVTVSWNSGALTSGVHTFPAVLQSSGLYSLSSVVTVPSSSLGTQTYICNVNHKPSNTKVDKKVEPKSC

SEQ ID NO: 52 - protein, 472 aa, synthetic construct
EVQLVESGGGLVQPGGSLKLSCAASGFTFNKYAMNWVRQAPGKGLEWVARIRSKYNNYATYYADSVKDRFTISRDDSKNTAYLQMNNLKTEDTAVYYCVRHGNFGNSYISYWAYWGQGTLVTVSSGGGGSGGGGSGGGGSQTVVTQEPSLTVSPGGTVTLTCGSSTGAVTSGNYPNWVQQKPGQAPRGLIGGTKFLAPGTPARFSGSLLGGKAALTLSGVQPEDEAEYYCVLWYSNRWVFGGGTKLTVLGGGGSDIVLTQSPATLSLSPGERATISCRASQSVSSYGQGFMHWYQQKPGQPPRLLIYGASSRATGIPARFSGSGSGTDFTLTISPLEPEDFAVYYCQQNKEDPWTFGGGTKLEIKRTVAAPSVFIFPPSDEQLKSGTASVVCLLNNFYPREAKVQWKVDNALQSGNSQESVTEQDSKDSTYSLSSTLTLSKADYEKHKVYACEVTHQGLSSPVTKSFNRGEC

SEQ ID NO: 53 - skipped

SEQ ID NO: 54 - protein, 214 aa, synthetic construct
DIQMTQSPSSLSASVGDRVTITCRASQGISNYLAWYQQKTGKVPKFLIYEASTLQSGVPSRFSGGGSGTDFTLTISSLQPEDVATYYCQNYNSAPFTFGPGTKVDIKRTVAAPSVFIFPPSDEQLKSGTASVVCLLNNFYPREAKVQWKVDNALQSGNSQESVTEQDSKDSTYSLSSTLTLSKADYEKHKVYACEVTHQGLSSPVTKSFNRGEC

SEQ ID NO: 55 - protein, 480 aa, synthetic construct
EVQLVESGGGLVQPGGSLKLSCAASGFTFNKYAMNWVRQAPGKGLEWVARIRSKYNNYATYYADSVKDRFTISRDDSKNTAYLQMNNLKTEDTAVYYCVRHGNFGNSYISYWAYWGQGTLVTVSSGGGGSGGGGSGGGGSQTVVTQEPSLTVSPGGTVTLTCGSSTGAVTSGNYPNWVQQKPGQAPRGLIGGTKFLAPGTPARFSGSLLGGKAALTLSGVQPEDEAEYYCVLWYSNRWVFGGGTKLTVLGGGGSQVQLVESGGGVVQPGRSLRLSCAASGFAFSRYGMHWVRQAPGKGLEWVAVIWYDGSNKYYADSVKGRFTISRDNSKNTQYLQMNSLRAEDTAVYYCARGGDFLYYYYYGMDVWGQGTTVTVSSASTKGPSVFPLAPSSKSTSGGTAALGCLVKDYFPEPVTVSWNSGALTSGVHTFPAVLQSSGLYSLSSVVTVPSSSLGTQTYICNVNHKPSNTKVDKKVEPKSC

SEQ ID NO: 56 - protein, 468 aa, synthetic construct
EVQLVESGGGLVQPGGSLKLSCAASGFTFNKYAMNWVRQAPGKGLEWVARIRSKYNNYATYYADSVKDRFTISRDDSKNTAYLQMNNLKTEDTAVYYCVRHGNFGNSYISYWAYWGQGTLVTVSSGGGGSGGGGSGGGGSQTVVTQEPSLTVSPGGTVTLTCGSSTGAVTSGNYPNWVQQKPGQAPRGLIGGTKFLAPGTPARFSGSLLGGKAALTLSGVQPEDEAEYYCVLWYSNRWVFGGGTKLTVLGGGGSDIQMTQSPSSLSASVGDRVTITCRASQGISNYLAWYQQKTGKVPKFLIYEASTLQSGVPSRFSGGGSGTDFTLTISSLQPEDVATYYCQNYNSAPFTFGPGTKVDIKRTVAAPSVFIFPPSDEQLKSGTASVVCLLNNFYPREAKVQWKVDNALQSGNSQESVTEQDSKDSTYSLSSTLTLSKADYEKHKVYACEVTHQGLSSPVTKSFNRGEC

SEQ ID NO: 57 - protein, 226 aa, synthetic construct
QVQLVESGGGVVQPGRSLRLSCAASGFAFSRYGMHWVRQAPGKGLEWVAVIWYDGSNKYYADSVKGRFTISRDNSKNTQYLQMNSLRAEDTAVYYCARGGDFLYYYYYGMDVWGQGTTVTVSSASTKGPSVFPLAPSSKSTSGGTAALGCLVKDYFPEPVTVSWNSGALTSGVHTFPAVLQSSGLYSLSSVVTVPSSSLGTQTYICNVNHKPSNTKVDKKVEPKSC

SEQ ID NO: 58-65 - skipped (8 entries)

SEQ ID NO: 66 - protein, 119 aa, synthetic construct
QVQLVQSGAEVKKPGSSVKVSCKASGYSFTTYYIHWVRQAPGQGLEWMGWFFPGSGNIKYNEKFKGRVTITADTSTSTAYMELSSLRSEDTAVYYCAGSYYSYDVLDYWGQGTTVTVSS

SEQ ID NO: 67 - protein, 107 aa, synthetic construct
DIQMTQSPSFLSASVGDRVTITCKASQNVGINVVWHQQKPGKAPKALIYSSSHRYSGVPSRFSGSGSGTEFTLTISSLQPEDFATYFCQQFKSYPLTFGQGTKLEIK

SEQ ID NO: 68 - protein, 10 aa, synthetic construct
GYSFTTYYIH

SEQ ID NO: 69 - protein, 17 aa, synthetic construct
WFFPGSGNIKYNEKFKG

SEQ ID NO: 70 - protein, 10 aa, synthetic construct
SYYSYDVLDY

SEQ ID NO: 71 - protein, 11 aa, synthetic construct
KASQNVGINVV

SEQ ID NO: 72 - protein, 7 aa, synthetic construct
SSSHRYS

SEQ ID NO: 73 - protein, 9 aa, synthetic construct
QQFKSYPLT

SEQ ID NO: 74 - protein, 10 aa, synthetic construct
  VARIANT 2: note = Y, E, H or P
  VARIANT 3: note = S, A, N, Q, E, G, H, I, L, K, M, P, T or V
  VARIANT 4: note = F or I
  VARIANT 5: note = T, A, R, N, Q, E, G, H, I, L, K, M, F, S, W, Y or V
  VARIANT 6: note = T, Q, H, L, F, S or Y
  VARIANT 7: note = Y, A, G, I, L, M, F, T, W or V
GXXXXXXYIH

SEQ ID NO: 75 - protein, 17 aa, synthetic construct
  VARIANT 1: note = W, R or D
  VARIANT 2: note = F, A, R, N, Q, E, G, H, L, K, M, T, Y or V
  VARIANT 3: note = F, R, S or Y
  VARIANT 5: note = G, R, Q, H, I, L, K, M, F, S, W or Y
  VARIANT 7: note = G, A, R, N, D, Q, E, H, L, K, M, S, T, W or Y
  VARIANT 8: note = N, R or K
  VARIANT 9: note = I, A, R, N, D, Q, E, L, K, M, F, P, S, T, W, Y or V
  VARIANT 10: note = K, A, N, Q, E, H, L, M, F, S, T, W or V
  VARIANT 12: note = N, D, Q, E, G, H, I, K, M, F, P, S, T, W, Y or V
  VARIANT 13: note = E, A, R, N, D, Q, G, H, I, L, K, M, F, P, S, T, W, Y or V
XXXPXSXXXXYXXKFKG

SEQ ID NO: 76 - protein, 12 aa, synthetic construct
  VARIANT 2: note = G or A
  VARIANT 3: note = S, G or A
  VARIANT 5: note = Y or W
  VARIANT 6: note = S, A or T
  VARIANT 7: note = Y or F
  VARIANT 8: note = D or N
  VARIANT 10: note = L, I or M
  VARIANT 12: note = Y or W
AXXYXXXXVXDX

SEQ ID NO: 77 - protein, 11 aa, synthetic construct
  VARIANT 5: note = A, R, N, D, Q, E, G, H, I, L, M, F, P, S, T, W, Y or V
  VARIANT 6: note = V, A, D, Q, G, H, L, K, M, F, P, S, T, W or Y
  VARIANT 7: note = G, A, R, N, D, Q, E, H, I, L, K, M, S, W or V
  VARIANT 8: note = I, A, N, Q, E, G, H, M, F, S, W, Y or V
  VARIANT 9: note = N, K or S
  VARIANT 10: note = V, A, N, D, Q, E, G, L, F, S or T
  VARIANT 11: note = V or T
KASQXXXXXXX

SEQ ID NO: 78 - protein, 7 aa, synthetic construct
  VARIANT 1: note = replace with A, G, H or V
  VARIANT 3: note = S, N, G, M, F, T, W or Y
  VARIANT 5: note = R, A, N, I, L, K, P, T or V
  VARIANT 6: note = replace with W
  VARIANT 7: note = S, R, N, C, Q, G, H, I, K, F, T, W, Y or V
SSXHXYX

SEQ ID NO: 79 - protein, 9 aa, synthetic construct
  VARIANT 1: note = replace with A, N, E, I, K, Y or V
  VARIANT 2: note = replace with Q, E, H or M
  VARIANT 4: note = replace with R, Q, G, H, I, K, M, F, S, T, W, Y or V
  VARIANT 5: note = S, A, R, N, D, Q, G, I, L, K, M, F, T, W or V
  VARIANT 6: note = Y, A, R, N, Q, E, I, L or V
  VARIANT 7: note = A, N, D, G, H, P, S, T or V
  VARIANT 8: note = L, I, M or V
  VARIANT 9: note = A, R, N, Q, E, G, H, I, L, M, F, S, T, W or V
QNFAXXXXX

SEQ ID NO: 80 - protein, 107 aa, synthetic construct
DIQMTQSPSFLSASVGDRVTITCKASQNVGNNVAWYQQKPGKAPKLLIYSSSHRYSGVPSRFSGSGSGTEFTLTISSLQPEDFATYFCQQFKSYPLTFGQGTKLEIK

SEQ ID NO: 81 - protein, 107 aa, synthetic construct
DIQMTQSPSSLSASVGDRVTITCKASQNVGINVVWYQQKPGKAPKLLIYSSSHRYSGVPSRFSGSGSGTEFTLTISSLQPEDFATYYCQQFKSYPLTFGQGTKLEIK

SEQ ID NO: 82 - protein, 107 aa, synthetic construct
DIQMTQSPSSLSASVGDRVTITCKASQNVGNNVAWYQQKPGKAPKLLIYSSSHRYSGVPSRFSGSGSGTEFTLTISSLQPEDFATYYCQQFKSYPLTFGQGTKLEIK

SEQ ID NO: 83 - protein, 107 aa, synthetic construct
DIQMTQSPSSLSASVGDRVTITCRASQNVGNNVAWYQQKPGKAPKLLIYSSSHRYSGVPSRFSGSGSGTEFTLTISSLQPEDFATYYCQQFKSYPLTFGQGTKLEIK

SEQ ID NO: 84 - protein, 107 aa, synthetic construct
DIQMTQSPSFLSASVGDRVTITCKASQNVADRVVWHQQKPGKAPKALIYSSSHRYKGVPSRFSGSGSGTEFTLTISSLQPEDFATYFCQQFKSYPLTFGQGTKLEIK

SEQ ID NO: 85 - protein, 107 aa, synthetic construct
DIQMTQSPSFLSASVGDRVTITCKASQNVGIRVVWHQQKPGKAPKALIYSSSHRYSGVPSRFSGSGSGTEFTLTISSLQPEDFATYFCQQFKSYPITFGQGTKLEIK

SEQ ID NO: 86 - protein, 107 aa, synthetic construct
DIQMTQSPSFLSASVGDRVTITCKASQNVGIRVVWHQQKPGKAPKALIYSSSHRYSGVPSRFSGSGSGTEFTLTISSLQPEDFATYFCQQFKFYPITFGQGTKLEIK

SEQ ID NO: 87 - protein, 107 aa, synthetic construct
DIQMTQSPSFLSASVGDRVTITCKASQNVGIRVVWHQQKPGKAPKALIYSSSHRYRGVPSRFSGSGSGTEFTLTISSLQPEDFATYFCQQFKSYPITFGQGTKLEIK

SEQ ID NO: 88 - protein, 107 aa, synthetic construct
DIQMTQSPSFLSASVGDRVTITCKASQNVGINVVWHQQKPGKAPKALIYSSSHRYKGVPSRFSGSGSGTEFTLTISSLQPEDFATYFCQQFKSYPITFGQGTKLEIK

SEQ ID NO: 89 - protein, 107 aa, synthetic construct
DIQMTQSPSFLSASVGDRVTITCKASQNVGIRVVWHQQKPGKAPKALIYSSSHRYKGVPSRFSGSGSGTEFTLTISSLQPEDFATYFCQQFKSYPITFGQGTKLEIK

SEQ ID NO: 90 - protein, 107 aa, synthetic construct
DIQMTQSPSFLSASVGDRVTITCKASQNVGINVVWHQQKPGKAPKALIYSSSHRYRGVPSRFSGSGSGTEFTLTISSLQPEDFATYFCQQFKFYPITFGQGTKLEIK

SEQ ID NO: 91 - protein, 107 aa, synthetic construct
DIQMTQSPSFLSASVGDRVTITCKASQNVGINVVWHQQKPGKAPKALIYSSSHRYRGVPSRFSGSGSGTEFTLTISSLQPEDFATYFCQQFKSYPITFGQGTKLEIK

SEQ ID NO: 92 - protein, 107 aa, synthetic construct
DIQMTQSPSFLSASVGDRVTITCKASQNVGIRVVWHQQKPGKAPKALIYSSSHRYKGVPSRFSGSGSGTEFTLTISSLQPEDFATYFCQQFKFYPITFGQGTKLEIK

SEQ ID NO: 93 - protein, 107 aa, synthetic construct
DIQMTQSPSFLSASVGDRVTITCKASQNVGIRVVWHQQKPGKAPKALIYSSSHRYRGVPSRFSGSGSGTEFTLTISSLQPEDFATYFCQQFKFYPITFGQGTKLEIK

SEQ ID NO: 94 - protein, 119 aa, synthetic construct
QVQLVQSGAEVKKPGASVKVSCKASGYSFTTYYIHWVRQAPGQGLEWMGWFFPGSGNIKYNEKFKGRVTITADTSTSTAYMELSSLRSEDTAVYYCAGSYYSYDVLDYWGQGTLVTVSS

SEQ ID NO: 95 - protein, 119 aa, synthetic construct
QVQLVQSGAEVKKPGASVKVSCKASGYSFTTYYIHWVRQAPGQGLEWMGWIFPGSGNIKYNEKFKGRVTITADTSTSTAYMELSSLRSEDTAVYYCAGSYYSYDVLDYWGQGTLVTVSS

SEQ ID NO: 96 - protein, 119 aa, synthetic construct
QVQLVQSGAEVKKPGASVKVSCKASGYSFTTYYIHWVRQAPGQGLEWMGWIYPGSGNIKYNEKFKGRVTITADTSTSTAYMELSSLRSEDTAVYYCAGSYYSYDVLDYWGQGTLVTVSS

SEQ ID NO: 97 - protein, 119 aa, synthetic construct
QVQLVQSGAEVKKPGASVKVSCKASGYSFTTYYIHWVRQAPGQGLEWMGWIYPGSGNIKYNEKFKGRVTITADTSTSTAYMELSSLRSEDTAVYYCARSYYSYDVLDYWGQGTLVTVSS

SEQ ID NO: 98 - protein, 119 aa, synthetic construct
QVQLVQSGAEVKKPGSSVKVSCKASGYSFRLTYIHWVRQAPGQGLEWMGWFFPGSGNIKYNEKFKGRVTITADTSTSTAYMELSSLRSEDTAVYYCAGSYYSYDVLDYWGQGTTVTVSS

SEQ ID NO: 99 - protein, 119 aa, synthetic construct
QVQLVQSGAEVKKPGSSVKVSCKASGHDFRLTYIHWVRQAPGQGLEWMGRVSAGSGNVKYNEKFKGRVTITADTSTSTAYMELSSLRSEDTAVYYCAVSYYSYDVLDYWGQGTTVTVSS

SEQ ID NO: 100 - protein, 119 aa, synthetic construct
QVQLVQSGAEVKKPGSSVKVSCKASGYSFTLYYIHWVRQAPGQGLEWMGWFFPGSGNIKYNEKFKGRVTITADTSTSTAYMELSSLRSEDTAVYYCAASYYSFDVLDYWGQGTTVTVSS

SEQ ID NO: 101 - protein, 119 aa, synthetic construct
QVQLVQSGAEVKKPGSSVKVSCKASGYSFTTYYIHWVRQAPGQGLEWMGWFFPRSGNIKYNEKFKGRVTITADTSTSTAYMELSSLRSEDTAVYYCAASYYSFDVLDYWGQGTTVTVSS

SEQ ID NO: 102 - protein, 119 aa, synthetic construct
QVQLVQSGAEVKKPGSSVKVSCKASGYSFTTYYIHWVRQAPGQGLEWMGWFFPGSGNIKYNEKFKGRVTITADTSTSTAYMELSSLRSEDTAVYYCAASYYSFDVLDYWGQGTTVTVSS

SEQ ID NO: 103 - protein, 119 aa, synthetic construct
QVQLVQSGAEVKKPGSSVKVSCKASGYSFTLWYIHWVRQAPGQGLEWMGWFFPGSGNIKYNEKFKGRVTITADTSTSTAYMELSSLRSEDTAVYYCAASYYSFDVLDYWGQGTTVTVSS

SEQ ID NO: 104 - protein, 119 aa, synthetic construct
QVQLVQSGAEVKKPGSSVKVSCKASGYSFTLWYIHWVRQAPGQGLEWMGWFFPRSGNIKYNEKFKGRVTITADTSTSTAYMELSSLRSEDTAVYYCAASYYSFDVLDYWGQGTTVTVSS

SEQ ID NO: 105 - protein, 119 aa, synthetic construct
QVQLVQSGAEVKKPGSSVKVSCKASGYSFTLYYIHWVRQAPGQGLEWMGWFFPRSGNIKYNEKFKGRVTITADTSTSTAYMELSSLRSEDTAVYYCAASYYSFDVLDYWGQGTTVTVSS

SEQ ID NO: 106 - protein, 119 aa, synthetic construct
QVQLVQSGAEVKKPGSSVKVSCKASGYSFTTYYIHWVRQAPGQGLEWMGWFFPRSGNIKYNEKFKGRVTITADTSTSTAYMELSSLRSEDTAVYYCAGSYYSFDVLDYWGQGTTVTVSS

SEQ ID NO: 107 - protein, 119 aa, synthetic construct
QVQLVQSGAEVKKPGSSVKVSCKASGYSFTLYYIHWVRQAPGQGLEWMGWFFPRSGNIKYNEKFKGRVTITADTSTSTAYMELSSLRSEDTAVYYCAGSYYSFDVLDYWGQGTTVTVSS

SEQ ID NO: 108 - protein, 119 aa, synthetic construct
QVQLVQSGAEVKKPGSSVKVSCKASGYSFTTWYIHWVRQAPGQGLEWMGWFFPGSGNIKYNEKFKGRVTITADTSTSTAYMELSSLRSEDTAVYYCAGSYYSFDVLDYWGQGTTVTVSS

SEQ ID NO: 109 - protein, 119 aa, synthetic construct
QVQLVQSGAEVKKPGSSVKVSCKASGYSFTLWYIHWVRQAPGQGLEWMGWFFPGSGNIKYNEKFKGRVTITADTSTSTAYMELSSLRSEDTAVYYCAGSYYSFDVLDYWGQGTTVTVSS

SEQ ID NO: 110 - protein, 119 aa, synthetic construct
QVQLVQSGAEVKKPGSSVKVSCKASGYSFTLYYIHWVRQAPGQGLEWMGWFFPGSGNIKYNEKFKGRVTITADTSTSTAYMELSSLRSEDTAVYYCAGSYYSFDVLDYWGQGTTVTVSS

SEQ ID NO: 111 - protein, 119 aa, synthetic construct
QVQLVQSGAEVKKPGSSVKVSCKASGYSFTLWYIHWVRQAPGQGLEWMGWFFPRSGNIKYNEKFKGRVTITADTSTSTAYMELSSLRSEDTAVYYCAGSYYSFDVLDYWGQGTTVTVSS

SEQ ID NO: 112 - protein, 5 aa, synthetic construct
TYYIH

SEQ ID NO: 113 - protein, 6 aa, synthetic construct
QNVGIN

SEQ ID NO: 114 - protein, 8 aa, synthetic construct
GYSFTTYY

SEQ ID NO: 115 - protein, 8 aa, synthetic construct
FFPGSGNI

SEQ ID NO: 116 - protein, 12 aa, synthetic construct
AGSYYSYDVLDY

SEQ ID NO: 117 - protein, 11 aa, synthetic construct
KASQNVGNNVA

SEQ ID NO: 118 - protein, 17 aa, synthetic construct
WIFPGSGNIKYNEKFKG

SEQ ID NO: 119 - protein, 6 aa, synthetic construct
QNVGNN

SEQ ID NO: 120 - protein, 8 aa, synthetic construct
IFPGSGNI

SEQ ID NO: 121 - protein, 17 aa, synthetic construct
WIYPGSGNIKYNEKFKG

SEQ ID NO: 122 - protein, 8 aa, synthetic construct
IYPGSGNI

SEQ ID NO: 123 - protein, 12 aa, synthetic construct
ARSYYSYDVLDY

SEQ ID NO: 124 - protein, 11 aa, synthetic construct
RASQNVGNNVA

SEQ ID NO: 125 - protein, 8 aa, synthetic construct
GYSFRLTY

SEQ ID NO: 126 - protein, 5 aa, synthetic construct
LTYIH

SEQ ID NO: 127 - protein, 11 aa, synthetic construct
KASQNVADRVV

SEQ ID NO: 128 - protein, 7 aa, synthetic construct
SSSHRYK

SEQ ID NO: 129 - protein, 17 aa, synthetic construct
RVSAGSGNVKYNEKFKG

SEQ ID NO: 130 - protein, 6 aa, synthetic construct
QNVADR

SEQ ID NO: 131 - protein, 8 aa, synthetic construct
GHDFRLTY

SEQ ID NO: 132 - protein, 8 aa, synthetic construct
VSAGSGNV

SEQ ID NO: 133 - protein, 12 aa, synthetic construct
AVSYYSYDVLDY

SEQ ID NO: 134 - protein, 11 aa, synthetic construct
KASQNVGIRVV

SEQ ID NO: 135 - protein, 9 aa, synthetic construct
QQFKSYPIT

SEQ ID NO: 136 - protein, 5 aa, synthetic construct
LYYIH

SEQ ID NO: 137 - protein, 10 aa, synthetic construct
SYYSFDVLDY

SEQ ID NO: 138 - protein, 6 aa, synthetic construct
QNVGIR

SEQ ID NO: 139 - protein, 8 aa, synthetic construct
GYSFTLYY

SEQ ID NO: 140 - protein, 12 aa, synthetic construct
AASYYSFDVLDY

SEQ ID NO: 141 - protein, 9 aa, synthetic construct
QQFKFYPIT

SEQ ID NO: 142 - protein, 17 aa, synthetic construct
WFFPRSGNIKYNEKFKG

SEQ ID NO: 143 - protein, 8 aa, synthetic construct
FFPRSGNI

SEQ ID NO: 144 - protein, 7 aa, synthetic construct
SSSHRYR

SEQ ID NO: 145 - protein, 5 aa, synthetic construct
TWYIH

SEQ ID NO: 146 - protein, 8 aa, synthetic construct
GYSFTTWY

SEQ ID NO: 147 - protein, 5 aa, synthetic construct
LWYIH

SEQ ID NO: 148 - protein, 8 aa, synthetic construct
GYSFTLWY

SEQ ID NO: 149 - protein, 241 aa, synthetic construct
QVQLVQSGAEVKKPGSSVKVSCKASGYSFTTYYIHWVRQAPGQGLEWMGWFFPGSGNIKYNEKFKGRVTITADTSTSTAYMELSSLRSEDTAVYYCAGSYYSYDVLDYWGQGTTVTVSSGGGGSGGGGSGGGGSDIQMTQSPSFLSASVGDRVTITCKASQNVGINVVWHQQKPGKAPKALIYSSSHRYSGVPSRFSGSGSGTEFTLTISSLQPEDFATYFCQQFKSYPLTFGQGTKLEIK

SEQ ID NO: 150 - protein, 241 aa, synthetic construct
DIQMTQSPSFLSASVGDRVTITCKASQNVGINVVWHQQKPGKAPKALIYSSSHRYSGVPSRFSGSGSGTEFTLTISSLQPEDFATYFCQQFKSYPLTFGQGTKLEIKGGGGSGGGGSGGGGSQVQLVQSGAEVKKPGSSVKVSCKASGYSFTTYYIHWVRQAPGQGLEWMGWFFPGSGNIKYNEKFKGRVTITADTSTSTAYMELSSLRSEDTAVYYCAGSYYSYDVLDYWGQGTTVTVSS

SEQ ID NO: 151 - protein, 241 aa, synthetic construct
QVQLVQSGAEVKKPGSSVKVSCKASGYSFTTYYIHWVRQAPGQCLEWMGWFFPGSGNIKYNEKFKGRVTITADTSTSTAYMELSSLRSEDTAVYYCAGSYYSYDVLDYWGQGTTVTVSSGGGGSGGGGSGGGGSDIQMTQSPSFLSASVGDRVTITCKASQNVGINVVWHQQKPGKAPKALIYSSSHRYSGVPSRFSGSGSGTEFTLTISSLQPEDFATYFCQQFKSYPLTFGCGTKLEIK

SEQ ID NO: 152 - protein, 241 aa, synthetic construct
DIQMTQSPSFLSASVGDRVTITCKASQNVGINVVWHQQKPGKAPKALIYSSSHRYSGVPSRFSGSGSGTEFTLTISSLQPEDFATYFCQQFKSYPLTFGCGTKLEIKGGGGSGGGGSGGGGSQVQLVQSGAEVKKPGSSVKVSCKASGYSFTTYYIHWVRQAPGQCLEWMGWFFPGSGNIKYNEKFKGRVTITADTSTSTAYMELSSLRSEDTAVYYCAGSYYSYDVLDYWGQGTTVTVSS

SEQ ID NO: 153 - protein, 241 aa, synthetic construct
QVQLVQSGAEVKKPGSSVKVSCKASGYSFTTYYIHWVRQAPGQGLEWMGWFFPGSGNIKYNEKFKGRVTITADTSTSTAYMELSSLRSEDTAVYYCAGSYYSYDVCDYWGQGTTVTVSSGGGGSGGGGSGGGGSDIQMTQSPSFLSASVGDRVTITCKASQNVGINVVWHQQKPGKAPKALICSSSHRYSGVPSRFSGSGSGTEFTLTISSLQPEDFATYFCQQFKSYPLTFGQGTKLEIK

SEQ ID NO: 154 - protein, 241 aa, synthetic construct
DIQMTQSPSFLSASVGDRVTITCKASQNVGINVVWHQQKPGKAPKALICSSSHRYSGVPSRFSGSGSGTEFTLTISSLQPEDFATYFCQQFKSYPLTFGQGTKLEIKGGGGSGGGGSGGGGSQVQLVQSGAEVKKPGSSVKVSCKASGYSFTTYYIHWVRQAPGQGLEWMGWFFPGSGNIKYNEKFKGRVTITADTSTSTAYMELSSLRSEDTAVYYCAGSYYSYDVCDYWGQGTTVTVSS

SEQ ID NO: 155 - protein, 241 aa, synthetic construct
QVQLVQSGAEVKKPGSSVKVSCKASGYSFTTYYIHWVRQAPGQGLEWMGWFFPGSGNIKYNEKFKGRVTITADTSTSTAYMELSSLRSEDTAVYYCAGSYYSYCVLDYWGQGTTVTVSSGGGGSGGGGSGGGGSDIQMTQSPSFLSASVGDRVTITCKASQNVGINVVWHQQKPGKAPKALIYCSSHRYSGVPSRFSGSGSGTEFTLTISSLQPEDFATYFCQQFKSYPLTFGQGTKLEIK

SEQ ID NO: 156 - protein, 241 aa, synthetic construct
DIQMTQSPSFLSASVGDRVTITCKASQNVGINVVWHQQKPGKAPKALIYCSSHRYSGVPSRFSGSGSGTEFTLTISSLQPEDFATYFCQQFKSYPLTFGQGTKLEIKGGGGSGGGGSGGGGSQVQLVQSGAEVKKPGSSVKVSCKASGYSFTTYYIHWVRQAPGQGLEWMGWFFPGSGNIKYNEKFKGRVTITADTSTSTAYMELSSLRSEDTAVYYCAGSYYSYCVLDYWGQGTTVTVSS

SEQ ID NO: 157 - protein, 241 aa, synthetic construct
QVQLVQSGAEVKKPGSSVKVSCKASGYSFTTYYIHWVRQAPGQGLEWMGWFFPGSGNIKYNEKFKGRVTITADTSTSTAYMELSSLRSEDTAVYYCAGSYYSYDVLDYWGCGTTVTVSSGGGGSGGGGSGGGGSDIQMTQSPSFLSASVGDRVTITCKASQNVGINVVWHQQKPGKCPKALIYSSSHRYSGVPSRFSGSGSGTEFTLTISSLQPEDFATYFCQQFKSYPLTFGQGTKLEIK

SEQ ID NO: 158 - protein, 241 aa, synthetic construct
DIQMTQSPSFLSASVGDRVTITCKASQNVGINVVWHQQKPGKCPKALIYSSSHRYSGVPSRFSGSGSGTEFTLTISSLQPEDFATYFCQQFKSYPLTFGQGTKLEIKGGGGSGGGGSGGGGSQVQLVQSGAEVKKPGSSVKVSCKASGYSFTTYYIHWVRQAPGQGLEWMGWFFPGSGNIKYNEKFKGRVTITADTSTSTAYMELSSLRSEDTAVYYCAGSYYSYDVLDYWGCGTTVTVSS

SEQ ID NO: 159 - protein, 241 aa, synthetic construct
QVQLVQSGAEVKKPGSSVKVSCKASGYSFTTYYIHWVRQAPGQGLEWMGWFFPGSGNIKYNEKFKGRVTITADTSTSTAYMELSSLRSEDTAVYYCAGSYYSYDVLCYWGQGTTVTVSSGGGGSGGGGSGGGGSDIQMTQSPSFLSASVGDRVTITCKASQNVGINVVWHQQKPGKAPKCLIYSSSHRYSGVPSRFSGSGSGTEFTLTISSLQPEDFATYFCQQFKSYPLTFGQGTKLEIK

SEQ ID NO: 160 - protein, 241 aa, synthetic construct
DIQMTQSPSFLSASVGDRVTITCKASQNVGINVVWHQQKPGKAPKCLIYSSSHRYSGVPSRFSGSGSGTEFTLTISSLQPEDFATYFCQQFKSYPLTFGQGTKLEIKGGGGSGGGGSGGGGSQVQLVQSGAEVKKPGSSVKVSCKASGYSFTTYYIHWVRQAPGQGLEWMGWFFPGSGNIKYNEKFKGRVTITADTSTSTAYMELSSLRSEDTAVYYCAGSYYSYDVLCYWGQGTTVTVSS

SEQ ID NO: 161 - protein, 241 aa, synthetic construct
QVQLVQSGAEVKKPGASVKVSCKASGYSFTTYYIHWVRQAPGQGLEWMGWFFPGSGNIKYNEKFKGRVTITADTSTSTAYMELSSLRSEDTAVYYCAGSYYSYDVLDYWGQGTLVTVSSGGGGSGGGGSGGGGSDIQMTQSPSFLSASVGDRVTITCKASQNVGINVVWHQQKPGKAPKALIYSSSHRYSGVPSRFSGSGSGTEFTLTISSLQPEDFATYFCQQFKSYPLTFGQGTKLEIK

SEQ ID NO: 162 - protein, 241 aa, synthetic construct
QVQLVQSGAEVKKPGASVKVSCKASGYSFTTYYIHWVRQAPGQCLEWMGWFFPGSGNIKYNEKFKGRVTITADTSTSTAYMELSSLRSEDTAVYYCAGSYYSYDVLDYWGQGTLVTVSSGGGGSGGGGSGGGGSDIQMTQSPSFLSASVGDRVTITCKASQNVGINVVWHQQKPGKAPKALIYSSSHRYSGVPSRFSGSGSGTEFTLTISSLQPEDFATYFCQQFKSYPLTFGCGTKLEIK

SEQ ID NO: 163 - protein, 241 aa, synthetic construct
QVQLVQSGAEVKKPGSSVKVSCKASGYSFRLTYIHWVRQAPGQGLEWMGWFFPGSGNIKYNEKFKGRVTITADTSTSTAYMELSSLRSEDTAVYYCAGSYYSYDVLDYWGQGTTVTVSSGGGGSGGGGSGGGGSDIQMTQSPSFLSASVGDRVTITCKASQNVGINVVWHQQKPGKAPKALIYSSSHRYSGVPSRFSGSGSGTEFTLTISSLQPEDFATYFCQQFKSYPLTFGQGTKLEIK

SEQ ID NO: 164 - protein, 241 aa, synthetic construct
DIQMTQSPSFLSASVGDRVTITCKASQNVGINVVWHQQKPGKAPKALIYSSSHRYSGVPSRFSGSGSGTEFTLTISSLQPEDFATYFCQQFKSYPLTFGQGTKLEIKGGGGSGGGGSGGGGSQVQLVQSGAEVKKPGSSVKVSCKASGYSFRLTYIHWVRQAPGQGLEWMGWFFPGSGNIKYNEKFKGRVTITADTSTSTAYMELSSLRSEDTAVYYCAGSYYSYDVLDYWGQGTTVTVSS

SEQ ID NO: 165 - protein, 241 aa, synthetic construct
QVQLVQSGAEVKKPGSSVKVSCKASGYSFRLTYIHWVRQAPGQCLEWMGWFFPGSGNIKYNEKFKGRVTITADTSTSTAYMELSSLRSEDTAVYYCAGSYYSYDVLDYWGQGTTVTVSSGGGGSGGGGSGGGGSDIQMTQSPSFLSASVGDRVTITCKASQNVGINVVWHQQKPGKAPKALIYSSSHRYSGVPSRFSGSGSGTEFTLTISSLQPEDFATYFCQQFKSYPLTFGCGTKLEIK

SEQ ID NO: 166 - protein, 241 aa, synthetic construct
DIQMTQSPSFLSASVGDRVTITCKASQNVGINVVWHQQKPGKAPKALIYSSSHRYSGVPSRFSGSGSGTEFTLTISSLQPEDFATYFCQQFKSYPLTFGCGTKLEIKGGGGSGGGGSGGGGSQVQLVQSGAEVKKPGSSVKVSCKASGYSFRLTYIHWVRQAPGQCLEWMGWFFPGSGNIKYNEKFKGRVTITADTSTSTAYMELSSLRSEDTAVYYCAGSYYSYDVLDYWGQGTTVTVSS

SEQ ID NO: 167 - protein, 241 aa, synthetic construct
QVQLVQSGAEVKKPGSSVKVSCKASGYSFRLTYIHWVRQAPGQGLEWMGWFFPGSGNIKYNEKFKGRVTITADTSTSTAYMELSSLRSEDTAVYYCAGSYYSYDVCDYWGQGTTVTVSSGGGGSGGGGSGGGGSDIQMTQSPSFLSASVGDRVTITCKASQNVGINVVWHQQKPGKAPKALICSSSHRYSGVPSRFSGSGSGTEFTLTISSLQPEDFATYFCQQFKSYPLTFGQGTKLEIK

SEQ ID NO: 168 - protein, 241 aa, synthetic construct
DIQMTQSPSFLSASVGDRVTITCKASQNVGINVVWHQQKPGKAPKALICSSSHRYSGVPSRFSGSGSGTEFTLTISSLQPEDFATYFCQQFKSYPLTFGQGTKLEIKGGGGSGGGGSGGGGSQVQLVQSGAEVKKPGSSVKVSCKASGYSFRLTYIHWVRQAPGQGLEWMGWFFPGSGNIKYNEKFKGRVTITADTSTSTAYMELSSLRSEDTAVYYCAGSYYSYDVCDYWGQGTTVTVSS

SEQ ID NO: 169 - protein, 241 aa, synthetic construct
QVQLVQSGAEVKKPGSSVKVSCKASGYSFRLTYIHWVRQAPGQGLEWMGWFFPGSGNIKYNEKFKGRVTITADTSTSTAYMELSSLRSEDTAVYYCAGSYYSYCVLDYWGQGTTVTVSSGGGGSGGGGSGGGGSDIQMTQSPSFLSASVGDRVTITCKASQNVGINVVWHQQKPGKAPKALIYCSSHRYSGVPSRFSGSGSGTEFTLTISSLQPEDFATYFCQQFKSYPLTFGQGTKLEIK

SEQ ID NO: 170 - protein, 241 aa, synthetic construct
DIQMTQSPSFLSASVGDRVTITCKASQNVGINVVWHQQKPGKAPKALIYCSSHRYSGVPSRFSGSGSGTEFTLTISSLQPEDFATYFCQQFKSYPLTFGQGTKLEIKGGGGSGGGGSGGGGSQVQLVQSGAEVKKPGSSVKVSCKASGYSFRLTYIHWVRQAPGQGLEWMGWFFPGSGNIKYNEKFKGRVTITADTSTSTAYMELSSLRSEDTAVYYCAGSYYSYCVLDYWGQGTTVTVSS

SEQ ID NO: 171 - protein, 241 aa, synthetic construct
QVQLVQSGAEVKKPGSSVKVSCKASGYSFRLTYIHWVRQAPGQGLEWMGWFFPGSGNIKYNEKFKGRVTITADTSTSTAYMELSSLRSEDTAVYYCAGSYYSYDVLDYWGCGTTVTVSSGGGGSGGGGSGGGGSDIQMTQSPSFLSASVGDRVTITCKASQNVGINVVWHQQKPGKCPKALIYSSSHRYSGVPSRFSGSGSGTEFTLTISSLQPEDFATYFCQQFKSYPLTFGQGTKLEIK

SEQ ID NO: 172 - protein, 241 aa, synthetic construct
DIQMTQSPSFLSASVGDRVTITCKASQNVGINVVWHQQKPGKCPKALIYSSSHRYSGVPSRFSGSGSGTEFTLTISSLQPEDFATYFCQQFKSYPLTFGQGTKLEIKGGGGSGGGGSGGGGSQVQLVQSGAEVKKPGSSVKVSCKASGYSFRLTYIHWVRQAPGQGLEWMGWFFPGSGNIKYNEKFKGRVTITADTSTSTAYMELSSLRSEDTAVYYCAGSYYSYDVLDYWGCGTTVTVSS

SEQ ID NO: 173 - protein, 241 aa, synthetic construct
QVQLVQSGAEVKKPGSSVKVSCKASGYSFRLTYIHWVRQAPGQGLEWMGWFFPGSGNIKYNEKFKGRVTITADTSTSTAYMELSSLRSEDTAVYYCAGSYYSYDVLCYWGQGTTVTVSSGGGGSGGGGSGGGGSDIQMTQSPSFLSASVGDRVTITCKASQNVGINVVWHQQKPGKAPKCLIYSSSHRYSGVPSRFSGSGSGTEFTLTISSLQPEDFATYFCQQFKSYPLTFGQGTKLEIK

SEQ ID NO: 174 - protein, 241 aa, synthetic construct
DIQMTQSPSFLSASVGDRVTITCKASQNVGINVVWHQQKPGKAPKCLIYSSSHRYSGVPSRFSGSGSGTEFTLTISSLQPEDFATYFCQQFKSYPLTFGQGTKLEIKGGGGSGGGGSGGGGSQVQLVQSGAEVKKPGSSVKVSCKASGYSFRLTYIHWVRQAPGQGLEWMGWFFPGSGNIKYNEKFKGRVTITADTSTSTAYMELSSLRSEDTAVYYCAGSYYSYDVLCYWGQGTTVTVSS

SEQ ID NO: 175 - protein, 241 aa, synthetic construct
QVQLVQSGAEVKKPGSSVKVSCKASGHDFRLTYIHWVRQAPGQGLEWMGRVSAGSGNVKYNEKFKGRVTITADTSTSTAYMELSSLRSEDTAVYYCAVSYYSYDVLDYWGQGTTVTVSSGGGGSGGGGSGGGGSDIQMTQSPSFLSASVGDRVTITCKASQNVGINVVWHQQKPGKAPKALIYSSSHRYSGVPSRFSGSGSGTEFTLTISSLQPEDFATYFCQQFKSYPLTFGQGTKLEIK

SEQ ID NO: 176 - protein, 241 aa, synthetic construct
DIQMTQSPSFLSASVGDRVTITCKASQNVGINVVWHQQKPGKAPKALIYSSSHRYSGVPSRFSGSGSGTEFTLTISSLQPEDFATYFCQQFKSYPLTFGQGTKLEIKGGGGSGGGGSGGGGSQVQLVQSGAEVKKPGSSVKVSCKASGHDFRLTYIHWVRQAPGQGLEWMGRVSAGSGNVKYNEKFKGRVTITADTSTSTAYMELSSLRSEDTAVYYCAVSYYSYDVLDYWGQGTTVTVSS

SEQ ID NO: 177 - protein, 241 aa, synthetic construct
QVQLVQSGAEVKKPGSSVKVSCKASGHDFRLTYIHWVRQAPGQCLEWMGRVSAGSGNVKYNEKFKGRVTITADTSTSTAYMELSSLRSEDTAVYYCAVSYYSYDVLDYWGQGTTVTVSSGGGGSGGGGSGGGGSDIQMTQSPSFLSASVGDRVTITCKASQNVGINVVWHQQKPGKAPKALIYSSSHRYSGVPSRFSGSGSGTEFTLTISSLQPEDFATYFCQQFKSYPLTFGCGTKLEIK

SEQ ID NO: 178 - protein, 241 aa, synthetic construct
DIQMTQSPSFLSASVGDRVTITCKASQNVGINVVWHQQKPGKAPKALIYSSSHRYSGVPSRFSGSGSGTEFTLTISSLQPEDFATYFCQQFKSYPLTFGCGTKLEIKGGGGSGGGGSGGGGSQVQLVQSGAEVKKPGSSVKVSCKASGHDFRLTYIHWVRQAPGQCLEWMGRVSAGSGNVKYNEKFKGRVTITADTSTSTAYMELSSLRSEDTAVYYCAVSYYSYDVLDYWGQGTTVTVSS

SEQ ID NO: 179 - protein, 241 aa, synthetic construct
QVQLVQSGAEVKKPGSSVKVSCKASGHDFRLTYIHWVRQAPGQGLEWMGRVSAGSGNVKYNEKFKGRVTITADTSTSTAYMELSSLRSEDTAVYYCAVSYYSYDVCDYWGQGTTVTVSSGGGGSGGGGSGGGGSDIQMTQSPSFLSASVGDRVTITCKASQNVGINVVWHQQKPGKAPKALICSSSHRYSGVPSRFSGSGSGTEFTLTISSLQPEDFATYFCQQFKSYPLTFGQGTKLEIK

SEQ ID NO: 180 - protein, 241 aa, synthetic construct
DIQMTQSPSFLSASVGDRVTITCKASQNVGINVVWHQQKPGKAPKALICSSSHRYSGVPSRFSGSGSGTEFTLTISSLQPEDFATYFCQQFKSYPLTFGQGTKLEIKGGGGSGGGGSGGGGSQVQLVQSGAEVKKPGSSVKVSCKASGHDFRLTYIHWVRQAPGQGLEWMGRVSAGSGNVKYNEKFKGRVTITADTSTSTAYMELSSLRSEDTAVYYCAVSYYSYDVCDYWGQGTTVTVSS

SEQ ID NO: 181 - protein, 241 aa, synthetic construct
QVQLVQSGAEVKKPGSSVKVSCKASGHDFRLTYIHWVRQAPGQGLEWMGRVSAGSGNVKYNEKFKGRVTITADTSTSTAYMELSSLRSEDTAVYYCAVSYYSYCVLDYWGQGTTVTVSSGGGGSGGGGSGGGGSDIQMTQSPSFLSASVGDRVTITCKASQNVGINVVWHQQKPGKAPKALIYCSSHRYSGVPSRFSGSGSGTEFTLTISSLQPEDFATYFCQQFKSYPLTFGQGTKLEIK

SEQ ID NO: 182 - protein, 241 aa, synthetic construct
DIQMTQSPSFLSASVGDRVTITCKASQNVGINVVWHQQKPGKAPKALIYCSSHRYSGVPSRFSGSGSGTEFTLTISSLQPEDFATYFCQQFKSYPLTFGQGTKLEIKGGGGSGGGGSGGGGSQVQLVQSGAEVKKPGSSVKVSCKASGHDFRLTYIHWVRQAPGQGLEWMGRVSAGSGNVKYNEKFKGRVTITADTSTSTAYMELSSLRSEDTAVYYCAVSYYSYCVLDYWGQGTTVTVSS

SEQ ID NO: 183 - protein, 241 aa, synthetic construct
QVQLVQSGAEVKKPGSSVKVSCKASGHDFRLTYIHWVRQAPGQGLEWMGRVSAGSGNVKYNEKFKGRVTITADTSTSTAYMELSSLRSEDTAVYYCAVSYYSYDVLDYWGCGTTVTVSSGGGGSGGGGSGGGGSDIQMTQSPSFLSASVGDRVTITCKASQNVGINVVWHQQKPGKCPKALIYSSSHRYSGVPSRFSGSGSGTEFTLTISSLQPEDFATYFCQQFKSYPLTFGQGTKLEIK

SEQ ID NO: 184 - protein, 241 aa, synthetic construct
DIQMTQSPSFLSASVGDRVTITCKASQNVGINVVWHQQKPGKCPKALIYSSSHRYSGVPSRFSGSGSGTEFTLTISSLQPEDFATYFCQQFKSYPLTFGQGTKLEIKGGGGSGGGGSGGGGSQVQLVQSGAEVKKPGSSVKVSCKASGHDFRLTYIHWVRQAPGQGLEWMGRVSAGSGNVKYNEKFKGRVTITADTSTSTAYMELSSLRSEDTAVYYCAVSYYSYDVLDYWGCGTTVTVSS

SEQ ID NO: 185 - protein, 241 aa, synthetic construct
QVQLVQSGAEVKKPGSSVKVSCKASGHDFRLTYIHWVRQAPGQGLEWMGRVSAGSGNVKYNEKFKGRVTITADTSTSTAYMELSSLRSEDTAVYYCAVSYYSYDVLCYWGQGTTVTVSSGGGGSGGGGSGGGGSDIQMTQSPSFLSASVGDRVTITCKASQNVGINVVWHQQKPGKAPKCLIYSSSHRYSGVPSRFSGSGSGTEFTLTISSLQPEDFATYFCQQFKSYPLTFGQGTKLEIK

SEQ ID NO: 186 - protein, 241 aa, synthetic construct
DIQMTQSPSFLSASVGDRVTITCKASQNVGINVVWHQQKPGKAPKCLIYSSSHRYSGVPSRFSGSGSGTEFTLTISSLQPEDFATYFCQQFKSYPLTFGQGTKLEIKGGGGSGGGGSGGGGSQVQLVQSGAEVKKPGSSVKVSCKASGHDFRLTYIHWVRQAPGQGLEWMGRVSAGSGNVKYNEKFKGRVTITADTSTSTAYMELSSLRSEDTAVYYCAVSYYSYDVLCYWGQGTTVTVSS

SEQ ID NO: 187 - protein, 241 aa, synthetic construct
QVQLVQSGAEVKKPGSSVKVSCKASGYSFTLYYIHWVRQAPGQGLEWMGWFFPGSGNIKYNEKFKGRVTITADTSTSTAYMELSSLRSEDTAVYYCAASYYSFDVLDYWGQGTTVTVSSGGGGSGGGGSGGGGSDIQMTQSPSFLSASVGDRVTITCKASQNVGIRVVWHQQKPGKAPKALIYSSSHRYSGVPSRFSGSGSGTEFTLTISSLQPEDFATYFCQQFKSYPITFGQGTKLEIK

SEQ ID NO: 188 - protein, 241 aa, synthetic construct
QVQLVQSGAEVKKPGSSVKVSCKASGYSFTTYYIHWVRQAPGQGLEWMGWFFPRSGNIKYNEKFKGRVTITADTSTSTAYMELSSLRSEDTAVYYCAASYYSFDVLDYWGQGTTVTVSSGGGGSGGGGSGGGGSDIQMTQSPSFLSASVGDRVTITCKASQNVGIRVVWHQQKPGKAPKALIYSSSHRYSGVPSRFSGSGSGTEFTLTISSLQPEDFATYFCQQFKFYPITFGQGTKLEIK

SEQ ID NO: 189 - protein, 241 aa, synthetic construct
QVQLVQSGAEVKKPGSSVKVSCKASGYSFTTYYIHWVRQAPGQGLEWMGWFFPGSGNIKYNEKFKGRVTITADTSTSTAYMELSSLRSEDTAVYYCAASYYSFDVLDYWGQGTTVTVSSGGGGSGGGGSGGGGSDIQMTQSPSFLSASVGDRVTITCKASQNVGIRVVWHQQKPGKAPKALIYSSSHRYRGVPSRFSGSGSGTEFTLTISSLQPEDFATYFCQQFKSYPITFGQGTKLEIK

SEQ ID NO: 190 - protein, 241 aa, synthetic construct
QVQLVQSGAEVKKPGSSVKVSCKASGYSFTTYYIHWVRQAPGQGLEWMGWFFPRSGNIKYNEKFKGRVTITADTSTSTAYMELSSLRSEDTAVYYCAASYYSFDVLDYWGQGTTVTVSSGGGGSGGGGSGGGGSDIQMTQSPSFLSASVGDRVTITCKASQNVGIRVVWHQQKPGKAPKALIYSSSHRYSGVPSRFSGSGSGTEFTLTISSLQPEDFATYFCQQFKSYPITFGQGTKLEIK

SEQ ID NO: 191 - protein, 241 aa, synthetic construct
QVQLVQSGAEVKKPGSSVKVSCKASGYSFTLWYIHWVRQAPGQGLEWMGWFFPGSGNIKYNEKFKGRVTITADTSTSTAYMELSSLRSEDTAVYYCAASYYSFDVLDYWGQGTTVTVSSGGGGSGGGGSGGGGSDIQMTQSPSFLSASVGDRVTITCKASQNVGIRVVWHQQKPGKAPKALIYSSSHRYSGVPSRFSGSGSGTEFTLTISSLQPEDFATYFCQQFKSYPITFGQGTKLEIK

SEQ ID NO: 192 - protein, 241 aa, synthetic construct
QVQLVQSGAEVKKPGSSVKVSCKASGYSFTLWYIHWVRQAPGQGLEWMGWFFPRSGNIKYNEKFKGRVTITADTSTSTAYMELSSLRSEDTAVYYCAASYYSFDVLDYWGQGTTVTVSSGGGGSGGGGSGGGGSDIQMTQSPSFLSASVGDRVTITCKASQNVGINVVWHQQKPGKAPKALIYSSSHRYKGVPSRFSGSGSGTEFTLTISSLQPEDFATYFCQQFKSYPITFGQGTKLEIK

SEQ ID NO: 193 - protein, 241 aa, synthetic construct
QVQLVQSGAEVKKPGSSVKVSCKASGYSFTLYYIHWVRQAPGQGLEWMGWFFPRSGNIKYNEKFKGRVTITADTSTSTAYMELSSLRSEDTAVYYCAASYYSFDVLDYWGQGTTVTVSSGGGGSGGGGSGGGGSDIQMTQSPSFLSASVGDRVTITCKASQNVGIRVVWHQQKPGKAPKALIYSSSHRYKGVPSRFSGSGSGTEFTLTISSLQPEDFATYFCQQFKSYPITFGQGTKLEIK

SEQ ID NO: 194 - protein, 241 aa, synthetic construct
QVQLVQSGAEVKKPGSSVKVSCKASGYSFTTYYIHWVRQAPGQGLEWMGWFFPRSGNIKYNEKFKGRVTITADTSTSTAYMELSSLRSEDTAVYYCAASYYSFDVLDYWGQGTTVTVSSGGGGSGGGGSGGGGSDIQMTQSPSFLSASVGDRVTITCKASQNVGINVVWHQQKPGKAPKALIYSSSHRYRGVPSRFSGSGSGTEFTLTISSLQPEDFATYFCQQFKSYPITFGQGTKLEIK

SEQ ID NO: 195 - protein, 241 aa, synthetic construct
QVQLVQSGAEVKKPGSSVKVSCKASGYSFTTYYIHWVRQAPGQGLEWMGWFFPRSGNIKYNEKFKGRVTITADTSTSTAYMELSSLRSEDTAVYYCAGSYYSFDVLDYWGQGTTVTVSSGGGGSGGGGSGGGGSDIQMTQSPSFLSASVGDRVTITCKASQNVGIRVVWHQQKPGKAPKALIYSSSHRYRGVPSRFSGSGSGTEFTLTISSLQPEDFATYFCQQFKSYPITFGQGTKLEIK

SEQ ID NO: 196 - protein, 241 aa, synthetic construct
QVQLVQSGAEVKKPGSSVKVSCKASGYSFTLYYIHWVRQAPGQGLEWMGWFFPRSGNIKYNEKFKGRVTITADTSTSTAYMELSSLRSEDTAVYYCAGSYYSFDVLDYWGQGTTVTVSSGGGGSGGGGSGGGGSDIQMTQSPSFLSASVGDRVTITCKASQNVGIRVVWHQQKPGKAPKALIYSSSHRYRGVPSRFSGSGSGTEFTLTISSLQPEDFATYFCQQFKSYPITFGQGTKLEIK

SEQ ID NO: 197 - protein, 241 aa, synthetic construct
QVQLVQSGAEVKKPGSSVKVSCKASGYSFTTWYIHWVRQAPGQGLEWMGWFFPGSGNIKYNEKFKGRVTITADTSTSTAYMELSSLRSEDTAVYYCAGSYYSFDVLDYWGQGTTVTVSSGGGGSGGGGSGGGGSDIQMTQSPSFLSASVGDRVTITCKASQNVGIRVVWHQQKPGKAPKALIYSSSHRYKGVPSRFSGSGSGTEFTLTISSLQPEDFATYFCQQFKSYPITFGQGTKLEIK

SEQ ID NO: 198 - protein, 241 aa, synthetic construct
QVQLVQSGAEVKKPGSSVKVSCKASGYSFTLWYIHWVRQAPGQGLEWMGWFFPGSGNIKYNEKFKGRVTITADTSTSTAYMELSSLRSEDTAVYYCAGSYYSFDVLDYWGQGTTVTVSSGGGGSGGGGSGGGGSDIQMTQSPSFLSASVGDRVTITCKASQNVGINVVWHQQKPGKAPKALIYSSSHRYRGVPSRFSGSGSGTEFTLTISSLQPEDFATYFCQQFKFYPITFGQGTKLEIK

SEQ ID NO: 199 - protein, 241 aa, synthetic construct
QVQLVQSGAEVKKPGSSVKVSCKASGYSFTLWYIHWVRQAPGQGLEWMGWFFPGSGNIKYNEKFKGRVTITADTSTSTAYMELSSLRSEDTAVYYCAGSYYSFDVLDYWGQGTTVTVSSGGGGSGGGGSGGGGSDIQMTQSPSFLSASVGDRVTITCKASQNVGIRVVWHQQKPGKAPKALIYSSSHRYSGVPSRFSGSGSGTEFTLTISSLQPEDFATYFCQQFKFYPITFGQGTKLEIK

SEQ ID NO: 200 - protein, 241 aa, synthetic construct
QVQLVQSGAEVKKPGSSVKVSCKASGYSFTTYYIHWVRQAPGQGLEWMGWFFPRSGNIKYNEKFKGRVTITADTSTSTAYMELSSLRSEDTAVYYCAGSYYSFDVLDYWGQGTTVTVSSGGGGSGGGGSGGGGSDIQMTQSPSFLSASVGDRVTITCKASQNVGIRVVWHQQKPGKAPKALIYSSSHRYKGVPSRFSGSGSGTEFTLTISSLQPEDFATYFCQQFKFYPITFGQGTKLEIK

SEQ ID NO: 201 - protein, 241 aa, synthetic construct
QVQLVQSGAEVKKPGSSVKVSCKASGYSFTLYYIHWVRQAPGQGLEWMGWFFPGSGNIKYNEKFKGRVTITADTSTSTAYMELSSLRSEDTAVYYCAGSYYSFDVLDYWGQGTTVTVSSGGGGSGGGGSGGGGSDIQMTQSPSFLSASVGDRVTITCKASQNVGIRVVWHQQKPGKAPKALIYSSSHRYKGVPSRFSGSGSGTEFTLTISSLQPEDFATYFCQQFKFYPITFGQGTKLEIK

SEQ ID NO: 202 - protein, 241 aa, synthetic construct
QVQLVQSGAEVKKPGSSVKVSCKASGYSFTLWYIHWVRQAPGQGLEWMGWFFPRSGNIKYNEKFKGRVTITADTSTSTAYMELSSLRSEDTAVYYCAGSYYSFDVLDYWGQGTTVTVSSGGGGSGGGGSGGGGSDIQMTQSPSFLSASVGDRVTITCKASQNVGIRVVWHQQKPGKAPKALIYSSSHRYRGVPSRFSGSGSGTEFTLTISSLQPEDFATYFCQQFKSYPITFGQGTKLEIK

SEQ ID NO: 203 - protein, 241 aa, synthetic construct
QVQLVQSGAEVKKPGSSVKVSCKASGYSFTLYYIHWVRQAPGQGLEWMGWFFPRSGNIKYNEKFKGRVTITADTSTSTAYMELSSLRSEDTAVYYCAGSYYSFDVLDYWGQGTTVTVSSGGGGSGGGGSGGGGSDIQMTQSPSFLSASVGDRVTITCKASQNVGINVVWHQQKPGKAPKALIYSSSHRYRGVPSRFSGSGSGTEFTLTISSLQPEDFATYFCQQFKSYPITFGQGTKLEIK

SEQ ID NO: 204 - protein, 241 aa, synthetic construct
QVQLVQSGAEVKKPGSSVKVSCKASGYSFTLWYIHWVRQAPGQGLEWMGWFFPRSGNIKYNEKFKGRVTITADTSTSTAYMELSSLRSEDTAVYYCAGSYYSFDVLDYWGQGTTVTVSSGGGGSGGGGSGGGGSDIQMTQSPSFLSASVGDRVTITCKASQNVGIRVVWHQQKPGKAPKALIYSSSHRYRGVPSRFSGSGSGTEFTLTISSLQPEDFATYFCQQFKFYPITFGQGTKLEIK

SEQ ID NO: 205 - protein, 241 aa, synthetic construct
QVQLVQSGAEVKKPGSSVKVSCKASGYSFTLYYIHWVRQAPGQCLEWMGWFFPGSGNIKYNEKFKGRVTITADTSTSTAYMELSSLRSEDTAVYYCAASYYSFDVLDYWGQGTTVTVSSGGGGSGGGGSGGGGSDIQMTQSPSFLSASVGDRVTITCKASQNVGIRVVWHQQKPGKAPKALIYSSSHRYSGVPSRFSGSGSGTEFTLTISSLQPEDFATYFCQQFKSYPITFGCGTKLEIK

SEQ ID NO: 206 - protein, 241 aa, synthetic construct
QVQLVQSGAEVKKPGSSVKVSCKASGYSFTTYYIHWVRQAPGQCLEWMGWFFPRSGNIKYNEKFKGRVTITADTSTSTAYMELSSLRSEDTAVYYCAASYYSFDVLDYWGQGTTVTVSSGGGGSGGGGSGGGGSDIQMTQSPSFLSASVGDRVTITCKASQNVGIRVVWHQQKPGKAPKALIYSSSHRYSGVPSRFSGSGSGTEFTLTISSLQPEDFATYFCQQFKFYPITFGCGTKLEIK

SEQ ID NO: 207 - protein, 241 aa, synthetic construct
QVQLVQSGAEVKKPGSSVKVSCKASGYSFTTYYIHWVRQAPGQCLEWMGWFFPGSGNIKYNEKFKGRVTITADTSTSTAYMELSSLRSEDTAVYYCAASYYSFDVLDYWGQGTTVTVSSGGGGSGGGGSGGGGSDIQMTQSPSFLSASVGDRVTITCKASQNVGIRVVWHQQKPGKAPKALIYSSSHRYRGVPSRFSGSGSGTEFTLTISSLQPEDFATYFCQQFKSYPITFGCGTKLEIK

SEQ ID NO: 208 - protein, 241 aa, synthetic construct
QVQLVQSGAEVKKPGSSVKVSCKASGYSFTTYYIHWVRQAPGQCLEWMGWFFPRSGNIKYNEKFKGRVTITADTSTSTAYMELSSLRSEDTAVYYCAASYYSFDVLDYWGQGTTVTVSSGGGGSGGGGSGGGGSDIQMTQSPSFLSASVGDRVTITCKASQNVGIRVVWHQQKPGKAPKALIYSSSHRYSGVPSRFSGSGSGTEFTLTISSLQPEDFATYFCQQFKSYPITFGCGTKLEIK

SEQ ID NO: 209 - protein, 241 aa, synthetic construct
QVQLVQSGAEVKKPGSSVKVSCKASGYSFTLWYIHWVRQAPGQCLEWMGWFFPGSGNIKYNEKFKGRVTITADTSTSTAYMELSSLRSEDTAVYYCAASYYSFDVLDYWGQGTTVTVSSGGGGSGGGGSGGGGSDIQMTQSPSFLSASVGDRVTITCKASQNVGIRVVWHQQKPGKAPKALIYSSSHRYSGVPSRFSGSGSGTEFTLTISSLQPEDFATYFCQQFKSYPITFGCGTKLEIK

SEQ ID NO: 210 - protein, 241 aa, synthetic construct
QVQLVQSGAEVKKPGSSVKVSCKASGYSFTLWYIHWVRQAPGQCLEWMGWFFPRSGNIKYNEKFKGRVTITADTSTSTAYMELSSLRSEDTAVYYCAASYYSFDVLDYWGQGTTVTVSSGGGGSGGGGSGGGGSDIQMTQSPSFLSASVGDRVTITCKASQNVGINVVWHQQKPGKAPKALIYSSSHRYKGVPSRFSGSGSGTEFTLTISSLQPEDFATYFCQQFKSYPITFGCGTKLEIK

SEQ ID NO: 211 - protein, 241 aa, synthetic construct
QVQLVQSGAEVKKPGSSVKVSCKASGYSFTLYYIHWVRQAPGQCLEWMGWFFPRSGNIKYNEKFKGRVTITADTSTSTAYMELSSLRSEDTAVYYCAASYYSFDVLDYWGQGTTVTVSSGGGGSGGGGSGGGGSDIQMTQSPSFLSASVGDRVTITCKASQNVGIRVVWHQQKPGKAPKALIYSSSHRYKGVPSRFSGSGSGTEFTLTISSLQPEDFATYFCQQFKSYPITFGCGTKLEIK

SEQ ID NO: 212 - protein, 241 aa, synthetic construct
QVQLVQSGAEVKKPGSSVKVSCKASGYSFTTYYIHWVRQAPGQCLEWMGWFFPRSGNIKYNEKFKGRVTITADTSTSTAYMELSSLRSEDTAVYYCAASYYSFDVLDYWGQGTTVTVSSGGGGSGGGGSGGGGSDIQMTQSPSFLSASVGDRVTITCKASQNVGINVVWHQQKPGKAPKALIYSSSHRYRGVPSRFSGSGSGTEFTLTISSLQPEDFATYFCQQFKSYPITFGCGTKLEIK

SEQ ID NO: 213 - protein, 241 aa, synthetic construct
QVQLVQSGAEVKKPGSSVKVSCKASGYSFTTYYIHWVRQAPGQCLEWMGWFFPRSGNIKYNEKFKGRVTITADTSTSTAYMELSSLRSEDTAVYYCAGSYYSFDVLDYWGQGTTVTVSSGGGGSGGGGSGGGGSDIQMTQSPSFLSASVGDRVTITCKASQNVGIRVVWHQQKPGKAPKALIYSSSHRYRGVPSRFSGSGSGTEFTLTISSLQPEDFATYFCQQFKSYPITFGCGTKLEIK

SEQ ID NO: 214 - protein, 241 aa, synthetic construct
QVQLVQSGAEVKKPGSSVKVSCKASGYSFTLYYIHWVRQAPGQCLEWMGWFFPRSGNIKYNEKFKGRVTITADTSTSTAYMELSSLRSEDTAVYYCAGSYYSFDVLDYWGQGTTVTVSSGGGGSGGGGSGGGGSDIQMTQSPSFLSASVGDRVTITCKASQNVGIRVVWHQQKPGKAPKALIYSSSHRYRGVPSRFSGSGSGTEFTLTISSLQPEDFATYFCQQFKSYPITFGCGTKLEIK

SEQ ID NO: 215 - protein, 241 aa, synthetic construct
QVQLVQSGAEVKKPGSSVKVSCKASGYSFTTWYIHWVRQAPGQCLEWMGWFFPGSGNIKYNEKFKGRVTITADTSTSTAYMELSSLRSEDTAVYYCAGSYYSFDVLDYWGQGTTVTVSSGGGGSGGGGSGGGGSDIQMTQSPSFLSASVGDRVTITCKASQNVGIRVVWHQQKPGKAPKALIYSSSHRYKGVPSRFSGSGSGTEFTLTISSLQPEDFATYFCQQFKSYPITFGCGTKLEIK

SEQ ID NO: 216 - protein, 241 aa, synthetic construct
QVQLVQSGAEVKKPGSSVKVSCKASGYSFTLWYIHWVRQAPGQCLEWMGWFFPGSGNIKYNEKFKGRVTITADTSTSTAYMELSSLRSEDTAVYYCAGSYYSFDVLDYWGQGTTVTVSSGGGGSGGGGSGGGGSDIQMTQSPSFLSASVGDRVTITCKASQNVGINVVWHQQKPGKAPKALIYSSSHRYRGVPSRFSGSGSGTEFTLTISSLQPEDFATYFCQQFKFYPITFGCGTKLEIK

SEQ ID NO: 217 - protein, 241 aa, synthetic construct
QVQLVQSGAEVKKPGSSVKVSCKASGYSFTLWYIHWVRQAPGQCLEWMGWFFPGSGNIKYNEKFKGRVTITADTSTSTAYMELSSLRSEDTAVYYCAGSYYSFDVLDYWGQGTTVTVSSGGGGSGGGGSGGGGSDIQMTQSPSFLSASVGDRVTITCKASQNVGIRVVWHQQKPGKAPKALIYSSSHRYSGVPSRFSGSGSGTEFTLTISSLQPEDFATYFCQQFKFYPITFGCGTKLEIK

SEQ ID NO: 218 - protein, 241 aa, synthetic construct
QVQLVQSGAEVKKPGSSVKVSCKASGYSFTTYYIHWVRQAPGQCLEWMGWFFPRSGNIKYNEKFKGRVTITADTSTSTAYMELSSLRSEDTAVYYCAGSYYSFDVLDYWGQGTTVTVSSGGGGSGGGGSGGGGSDIQMTQSPSFLSASVGDRVTITCKASQNVGIRVVWHQQKPGKAPKALIYSSSHRYKGVPSRFSGSGSGTEFTLTISSLQPEDFATYFCQQFKFYPITFGCGTKLEIK

SEQ ID NO: 219 - protein, 241 aa, synthetic construct
QVQLVQSGAEVKKPGSSVKVSCKASGYSFTLYYIHWVRQAPGQCLEWMGWFFPGSGNIKYNEKFKGRVTITADTSTSTAYMELSSLRSEDTAVYYCAGSYYSFDVLDYWGQGTTVTVSSGGGGSGGGGSGGGGSDIQMTQSPSFLSASVGDRVTITCKASQNVGIRVVWHQQKPGKAPKALIYSSSHRYKGVPSRFSGSGSGTEFTLTISSLQPEDFATYFCQQFKFYPITFGCGTKLEIK

SEQ ID NO: 220 - protein, 241 aa, synthetic construct
QVQLVQSGAEVKKPGSSVKVSCKASGYSFTLWYIHWVRQAPGQCLEWMGWFFPRSGNIKYNEKFKGRVTITADTSTSTAYMELSSLRSEDTAVYYCAGSYYSFDVLDYWGQGTTVTVSSGGGGSGGGGSGGGGSDIQMTQSPSFLSASVGDRVTITCKASQNVGIRVVWHQQKPGKAPKALIYSSSHRYRGVPSRFSGSGSGTEFTLTISSLQPEDFATYFCQQFKSYPITFGCGTKLEIK

SEQ ID NO: 221 - protein, 241 aa, synthetic construct
QVQLVQSGAEVKKPGSSVKVSCKASGYSFTLYYIHWVRQAPGQCLEWMGWFFPRSGNIKYNEKFKGRVTITADTSTSTAYMELSSLRSEDTAVYYCAGSYYSFDVLDYWGQGTTVTVSSGGGGSGGGGSGGGGSDIQMTQSPSFLSASVGDRVTITCKASQNVGINVVWHQQKPGKAPKALIYSSSHRYRGVPSRFSGSGSGTEFTLTISSLQPEDFATYFCQQFKSYPITFGCGTKLEIK

SEQ ID NO: 222 - protein, 241 aa, synthetic construct
QVQLVQSGAEVKKPGSSVKVSCKASGYSFTLWYIHWVRQAPGQCLEWMGWFFPRSGNIKYNEKFKGRVTITADTSTSTAYMELSSLRSEDTAVYYCAGSYYSFDVLDYWGQGTTVTVSSGGGGSGGGGSGGGGSDIQMTQSPSFLSASVGDRVTITCKASQNVGIRVVWHQQKPGKAPKALIYSSSHRYRGVPSRFSGSGSGTEFTLTISSLQPEDFATYFCQQFKFYPITFGCGTKLEIK

SEQ ID NO: 223 - protein, 95 aa, synthetic construct
NAGVTQTPKFQVLKTGQSMTLQCAQDMNHEYMSWYRQDPGMGLRLIHYSVGAGITDQGEVPNGYNVSRSTTEDFPLRLLSAAPSQTSVYFCASSY

SEQ ID NO: 224 - protein, 95 aa, synthetic construct
NADVTQSPKFQILKTGQSMTLQCAQDMNHNSMYWYRQDPGMGLRLIHYSATEDTTDPGEVPDGYSVSRLNKKEFLLRLESAALSQTSVYFCASSY

SEQ ID NO: 225 - protein, 95 aa, synthetic construct
NAGVTQTPKFQVLKTGQNMTLKCAQDMNHDRMYWYRQDPGMGLRLIHYSAGEGSTEKGEVPNGYNASRLNKKDFLLRLESAAPSQTSMYFCASSY

SEQ ID NO: 226 - protein, 95 aa, synthetic construct
NAGVTQTPKFQVLKTGQSMTLQCAQDMNHDYMYWYRQDPGMGLRLIHYSVGEGSTEKGEVPDGYNVTRSNTEDFPLRLESAAPSQTSVYFCASSY

SEQ ID NO: 227 - protein, 95 aa, synthetic construct
NAGVNQTPKFQVLKTGQSMTLQCAQDMNHESMSWYRQDPGMGLRLIHYSVGAGITDKGEVPNGYNVSRSNTEDFPLRLESAASSQTSVYFCASSY

SEQ ID NO: 228 - protein, 96 aa, synthetic construct
DAGVIQSPRHEVTEMGQEVTLRCKPISGHNSLFWYRQTMMRGLELLIYFNNNVPIDDSGMPEDRFSAKMPNASFSTLKIQPSEPRDSAVYFCASSY

SEQ ID NO: 229 - protein, 96 aa, synthetic construct
DAGVIQSPRHEVTEMGKEVTLRCEPISGHTYLFWYRQTMMRGLEFLIYFNNKSPIDDSGMPKDRFSAKMPDASFSTLKIQPSEPRDSAVYFCASSY

SEQ ID NO: 230 - protein, 214 aa, synthetic construct
DIQMTQSPSFLSASVGDRVTITCKASQNVADRVVWHQQKPGKAPKALIYSSSHRYKGVPSRFSGSGSGTEFTLTISSLQPEDFATYFCQQFKSYPLTFGQGTKLEIKRTVAAPSVFIFPPSDEQLKSGTASVVCLLNNFYPREAKVQWKVDNALQSGNSQESVTEQDSKDSTYSLSSTLTLSKADYEKHKVYACEVTHQGLSSPVTKSFNRGEC

SEQ ID NO: 231 - protein, 214 aa, synthetic construct
DIQMTQSPSFLSASVGDRVTITCKASQNVGINVVWHQQKPGKAPKALIYSSSHRYSGVPSRFSGSGSGTEFTLTISSLQPEDFATYFCQQFKSYPLTFGQGTKLEIKRTVAAPSVFIFPPSDEQLKSGTASVVCLLNNFYPREAKVQWKVDNALQSGNSQESVTEQDSKDSTYSLSSTLTLSKADYEKHKVYACEVTHQGLSSPVTKSFNRGEC

SEQ ID NO: 232 - protein, 214 aa, synthetic construct
DIQMTQSPSFLSASVGDRVTITCKASQNVGNNVAWYQQKPGKAPKLLIYSSSHRYSGVPSRFSGSGSGTEFTLTISSLQPEDFATYFCQQFKSYPLTFGQGTKLEIKRTVAAPSVFIFPPSDEQLKSGTASVVCLLNNFYPREAKVQWKVDNALQSGNSQESVTEQDSKDSTYSLSSTLTLSKADYEKHKVYACEVTHQGLSSPVTKSFNRGEC

SEQ ID NO: 233 - protein, 214 aa, synthetic construct
DIQMTQSPSSLSASVGDRVTITCKASQNVGINVVWYQQKPGKAPKLLIYSSSHRYSGVPSRFSGSGSGTEFTLTISSLQPEDFATYYCQQFKSYPLTFGQGTKLEIKRTVAAPSVFIFPPSDEQLKSGTASVVCLLNNFYPREAKVQWKVDNALQSGNSQESVTEQDSKDSTYSLSSTLTLSKADYEKHKVYACEVTHQGLSSPVTKSFNRGEC

SEQ ID NO: 234 - protein, 214 aa, synthetic construct
DIQMTQSPSSLSASVGDRVTITCKASQNVGNNVAWYQQKPGKAPKLLIYSSSHRYSGVPSRFSGSGSGTEFTLTISSLQPEDFATYYCQQFKSYPLTFGQGTKLEIKRTVAAPSVFIFPPSDEQLKSGTASVVCLLNNFYPREAKVQWKVDNALQSGNSQESVTEQDSKDSTYSLSSTLTLSKADYEKHKVYACEVTHQGLSSPVTKSFNRGEC

SEQ ID NO: 235 - protein, 214 aa, synthetic construct
DIQMTQSPSSLSASVGDRVTITCRASQNVGNNVAWYQQKPGKAPKLLIYSSSHRYSGVPSRFSGSGSGTEFTLTISSLQPEDFATYYCQQFKSYPLTFGQGTKLEIKRTVAAPSVFIFPPSDEQLKSGTASVVCLLNNFYPREAKVQWKVDNALQSGNSQESVTEQDSKDSTYSLSSTLTLSKADYEKHKVYACEVTHQGLSSPVTKSFNRGEC

SEQ ID NO: 236 - protein, 214 aa, synthetic construct
DIQMTQSPSFLSASVGDRVTITCKASQNVGIRVVWHQQKPGKAPKALIYSSSHRYSGVPSRFSGSGSGTEFTLTISSLQPEDFATYFCQQFKSYPITFGQGTKLEIKRTVAAPSVFIFPPSDEQLKSGTASVVCLLNNFYPREAKVQWKVDNALQSGNSQESVTEQDSKDSTYSLSSTLTLSKADYEKHKVYACEVTHQGLSSPVTKSFNRGEC

SEQ ID NO: 237 - protein, 214 aa, synthetic construct
DIQMTQSPSFLSASVGDRVTITCKASQNVGIRVVWHQQKPGKAPKALIYSSSHRYSGVPSRFSGSGSGTEFTLTISSLQPEDFATYFCQQFKFYPITFGQGTKLEIKRTVAAPSVFIFPPSDEQLKSGTASVVCLLNNFYPREAKVQWKVDNALQSGNSQESVTEQDSKDSTYSLSSTLTLSKADYEKHKVYACEVTHQGLSSPVTKSFNRGEC

SEQ ID NO: 238 - protein, 214 aa, synthetic construct
DIQMTQSPSFLSASVGDRVTITCKASQNVGIRVVWHQQKPGKAPKALIYSSSHRYRGVPSRFSGSGSGTEFTLTISSLQPEDFATYFCQQFKSYPITFGQGTKLEIKRTVAAPSVFIFPPSDEQLKSGTASVVCLLNNFYPREAKVQWKVDNALQSGNSQESVTEQDSKDSTYSLSSTLTLSKADYEKHKVYACEVTHQGLSSPVTKSFNRGEC

SEQ ID NO: 239 - protein, 214 aa, synthetic construct
DIQMTQSPSFLSASVGDRVTITCKASQNVGINVVWHQQKPGKAPKALIYSSSHRYKGVPSRFSGSGSGTEFTLTISSLQPEDFATYFCQQFKSYPITFGQGTKLEIKRTVAAPSVFIFPPSDEQLKSGTASVVCLLNNFYPREAKVQWKVDNALQSGNSQESVTEQDSKDSTYSLSSTLTLSKADYEKHKVYACEVTHQGLSSPVTKSFNRGEC

SEQ ID NO: 240 - protein, 214 aa, synthetic construct
DIQMTQSPSFLSASVGDRVTITCKASQNVGIRVVWHQQKPGKAPKALIYSSSHRYKGVPSRFSGSGSGTEFTLTISSLQPEDFATYFCQQFKSYPITFGQGTKLEIKRTVAAPSVFIFPPSDEQLKSGTASVVCLLNNFYPREAKVQWKVDNALQSGNSQESVTEQDSKDSTYSLSSTLTLSKADYEKHKVYACEVTHQGLSSPVTKSFNRGEC

SEQ ID NO: 241 - protein, 214 aa, synthetic construct
DIQMTQSPSFLSASVGDRVTITCKASQNVGINVVWHQQKPGKAPKALIYSSSHRYRGVPSRFSGSGSGTEFTLTISSLQPEDFATYFCQQFKSYPITFGQGTKLEIKRTVAAPSVFIFPPSDEQLKSGTASVVCLLNNFYPREAKVQWKVDNALQSGNSQESVTEQDSKDSTYSLSSTLTLSKADYEKHKVYACEVTHQGLSSPVTKSFNRGEC

SEQ ID NO: 242 - protein, 214 aa, synthetic construct
DIQMTQSPSFLSASVGDRVTITCKASQNVGINVVWHQQKPGKAPKALIYSSSHRYRGVPSRFSGSGSGTEFTLTISSLQPEDFATYFCQQFKFYPITFGQGTKLEIKRTVAAPSVFIFPPSDEQLKSGTASVVCLLNNFYPREAKVQWKVDNALQSGNSQESVTEQDSKDSTYSLSSTLTLSKADYEKHKVYACEVTHQGLSSPVTKSFNRGEC

SEQ ID NO: 243 - protein, 214 aa, synthetic construct
DIQMTQSPSFLSASVGDRVTITCKASQNVGIRVVWHQQKPGKAPKALIYSSSHRYKGVPSRFSGSGSGTEFTLTISSLQPEDFATYFCQQFKFYPITFGQGTKLEIKRTVAAPSVFIFPPSDEQLKSGTASVVCLLNNFYPREAKVQWKVDNALQSGNSQESVTEQDSKDSTYSLSSTLTLSKADYEKHKVYACEVTHQGLSSPVTKSFNRGEC

SEQ ID NO: 244 - protein, 214 aa, synthetic construct
DIQMTQSPSFLSASVGDRVTITCKASQNVGIRVVWHQQKPGKAPKALIYSSSHRYRGVPSRFSGSGSGTEFTLTISSLQPEDFATYFCQQFKFYPITFGQGTKLEIKRTVAAPSVFIFPPSDEQLKSGTASVVCLLNNFYPREAKVQWKVDNALQSGNSQESVTEQDSKDSTYSLSSTLTLSKADYEKHKVYACEVTHQGLSSPVTKSFNRGEC

SEQ ID NO: 245 - protein, 214 aa, synthetic construct
DIQMTQSPSFLSASVGDRVTITCKASQAVGINVVWHQQKPGKAPKALIYSSSHRYSGVPSRFSGSGSGTEFTLTISSLQPEDFATYFCQQFKSYPLTFGQGTKLEIKRTVAAPSVFIFPPSDEQLKSGTASVVCLLNNFYPREAKVQWKVDNALQSGNSQESVTEQDSKDSTYSLSSTLTLSKADYEKHKVYACEVTHQGLSSPVTKSFNRGEC

SEQ ID NO: 246 - protein, 214 aa, synthetic construct
DIQMTQSPSFLSASVGDRVTITCKASQDVGINVVWHQQKPGKAPKALIYSSSHRYSGVPSRFSGSGSGTEFTLTISSLQPEDFATYFCQQFKSYPLTFGQGTKLEIKRTVAAPSVFIFPPSDEQLKSGTASVVCLLNNFYPREAKVQWKVDNALQSGNSQESVTEQDSKDSTYSLSSTLTLSKADYEKHKVYACEVTHQGLSSPVTKSFNRGEC

SEQ ID NO: 247 - protein, 214 aa, synthetic construct
DIQMTQSPSFLSASVGDRVTITCKASQEVGINVVWHQQKPGKAPKALIYSSSHRYSGVPSRFSGSGSGTEFTLTISSLQPEDFATYFCQQFKSYPLTFGQGTKLEIKRTVAAPSVFIFPPSDEQLKSGTASVVCLLNNFYPREAKVQWKVDNALQSGNSQESVTEQDSKDSTYSLSSTLTLSKADYEKHKVYACEVTHQGLSSPVTKSFNRGEC

SEQ ID NO: 248 - protein, 214 aa, synthetic construct
DIQMTQSPSFLSASVGDRVTITCKASQFVGINVVWHQQKPGKAPKALIYSSSHRYSGVPSRFSGSGSGTEFTLTISSLQPEDFATYFCQQFKSYPLTFGQGTKLEIKRTVAAPSVFIFPPSDEQLKSGTASVVCLLNNFYPREAKVQWKVDNALQSGNSQESVTEQDSKDSTYSLSSTLTLSKADYEKHKVYACEVTHQGLSSPVTKSFNRGEC

SEQ ID NO: 249 - protein, 214 aa, synthetic construct
DIQMTQSPSFLSASVGDRVTITCKASQGVGINVVWHQQKPGKAPKALIYSSSHRYSGVPSRFSGSGSGTEFTLTISSLQPEDFATYFCQQFKSYPLTFGQGTKLEIKRTVAAPSVFIFPPSDEQLKSGTASVVCLLNNFYPREAKVQWKVDNALQSGNSQESVTEQDSKDSTYSLSSTLTLSKADYEKHKVYACEVTHQGLSSPVTKSFNRGEC

SEQ ID NO: 250 - protein, 214 aa, synthetic construct
DIQMTQSPSFLSASVGDRVTITCKASQHVGINVVWHQQKPGKAPKALIYSSSHRYSGVPSRFSGSGSGTEFTLTISSLQPEDFATYFCQQFKSYPLTFGQGTKLEIKRTVAAPSVFIFPPSDEQLKSGTASVVCLLNNFYPREAKVQWKVDNALQSGNSQESVTEQDSKDSTYSLSSTLTLSKADYEKHKVYACEVTHQGLSSPVTKSFNRGEC

SEQ ID NO: 251 - protein, 214 aa, synthetic construct
DIQMTQSPSFLSASVGDRVTITCKASQIVGINVVWHQQKPGKAPKALIYSSSHRYSGVPSRFSGSGSGTEFTLTISSLQPEDFATYFCQQFKSYPLTFGQGTKLEIKRTVAAPSVFIFPPSDEQLKSGTASVVCLLNNFYPREAKVQWKVDNALQSGNSQESVTEQDSKDSTYSLSSTLTLSKADYEKHKVYACEVTHQGLSSPVTKSFNRGEC

SEQ ID NO: 252 - protein, 214 aa, synthetic construct
DIQMTQSPSFLSASVGDRVTITCKASQLVGINVVWHQQKPGKAPKALIYSSSHRYSGVPSRFSGSGSGTEFTLTISSLQPEDFATYFCQQFKSYPLTFGQGTKLEIKRTVAAPSVFIFPPSDEQLKSGTASVVCLLNNFYPREAKVQWKVDNALQSGNSQESVTEQDSKDSTYSLSSTLTLSKADYEKHKVYACEVTHQGLSSPVTKSFNRGEC

SEQ ID NO: 253 - protein, 214 aa, synthetic construct
DIQMTQSPSFLSASVGDRVTITCKASQMVGINVVWHQQKPGKAPKALIYSSSHRYSGVPSRFSGSGSGTEFTLTISSLQPEDFATYFCQQFKSYPLTFGQGTKLEIKRTVAAPSVFIFPPSDEQLKSGTASVVCLLNNFYPREAKVQWKVDNALQSGNSQESVTEQDSKDSTYSLSSTLTLSKADYEKHKVYACEVTHQGLSSPVTKSFNRGEC

SEQ ID NO: 254 - protein, 214 aa, synthetic construct
DIQMTQSPSFLSASVGDRVTITCKASQPVGINVVWHQQKPGKAPKALIYSSSHRYSGVPSRFSGSGSGTEFTLTISSLQPEDFATYFCQQFKSYPLTFGQGTKLEIKRTVAAPSVFIFPPSDEQLKSGTASVVCLLNNFYPREAKVQWKVDNALQSGNSQESVTEQDSKDSTYSLSSTLTLSKADYEKHKVYACEVTHQGLSSPVTKSFNRGEC

SEQ ID NO: 255 - protein, 214 aa, synthetic construct
DIQMTQSPSFLSASVGDRVTITCKASQQVGINVVWHQQKPGKAPKALIYSSSHRYSGVPSRFSGSGSGTEFTLTISSLQPEDFATYFCQQFKSYPLTFGQGTKLEIKRTVAAPSVFIFPPSDEQLKSGTASVVCLLNNFYPREAKVQWKVDNALQSGNSQESVTEQDSKDSTYSLSSTLTLSKADYEKHKVYACEVTHQGLSSPVTKSFNRGEC

SEQ ID NO: 256 - protein, 214 aa, synthetic construct
DIQMTQSPSFLSASVGDRVTITCKASQRVGINVVWHQQKPGKAPKALIYSSSHRYSGVPSRFSGSGSGTEFTLTISSLQPEDFATYFCQQFKSYPLTFGQGTKLEIKRTVAAPSVFIFPPSDEQLKSGTASVVCLLNNFYPREAKVQWKVDNALQSGNSQESVTEQDSKDSTYSLSSTLTLSKADYEKHKVYACEVTHQGLSSPVTKSFNRGEC

SEQ ID NO: 257 - protein, 214 aa, synthetic construct
DIQMTQSPSFLSASVGDRVTITCKASQSVGINVVWHQQKPGKAPKALIYSSSHRYSGVPSRFSGSGSGTEFTLTISSLQPEDFATYFCQQFKSYPLTFGQGTKLEIKRTVAAPSVFIFPPSDEQLKSGTASVVCLLNNFYPREAKVQWKVDNALQSGNSQESVTEQDSKDSTYSLSSTLTLSKADYEKHKVYACEVTHQGLSSPVTKSFNRGEC

SEQ ID NO: 258 - protein, 214 aa, synthetic construct
DIQMTQSPSFLSASVGDRVTITCKASQTVGINVVWHQQKPGKAPKALIYSSSHRYSGVPSRFSGSGSGTEFTLTISSLQPEDFATYFCQQFKSYPLTFGQGTKLEIKRTVAAPSVFIFPPSDEQLKSGTASVVCLLNNFYPREAKVQWKVDNALQSGNSQESVTEQDSKDSTYSLSSTLTLSKADYEKHKVYACEVTHQGLSSPVTKSFNRGEC

SEQ ID NO: 259 - protein, 214 aa, synthetic construct
DIQMTQSPSFLSASVGDRVTITCKASQVVGINVVWHQQKPGKAPKALIYSSSHRYSGVPSRFSGSGSGTEFTLTISSLQPEDFATYFCQQFKSYPLTFGQGTKLEIKRTVAAPSVFIFPPSDEQLKSGTASVVCLLNNFYPREAKVQWKVDNALQSGNSQESVTEQDSKDSTYSLSSTLTLSKADYEKHKVYACEVTHQGLSSPVTKSFNRGEC

SEQ ID NO: 260 - protein, 214 aa, synthetic construct
DIQMTQSPSFLSASVGDRVTITCKASQWVGINVVWHQQKPGKAPKALIYSSSHRYSGVPSRFSGSGSGTEFTLTISSLQPEDFATYFCQQFKSYPLTFGQGTKLEIKRTVAAPSVFIFPPSDEQLKSGTASVVCLLNNFYPREAKVQWKVDNALQSGNSQESVTEQDSKDSTYSLSSTLTLSKADYEKHKVYACEVTHQGLSSPVTKSFNRGEC

SEQ ID NO: 261 - protein, 214 aa, synthetic construct
DIQMTQSPSFLSASVGDRVTITCKASQYVGINVVWHQQKPGKAPKALIYSSSHRYSGVPSRFSGSGSGTEFTLTISSLQPEDFATYFCQQFKSYPLTFGQGTKLEIKRTVAAPSVFIFPPSDEQLKSGTASVVCLLNNFYPREAKVQWKVDNALQSGNSQESVTEQDSKDSTYSLSSTLTLSKADYEKHKVYACEVTHQGLSSPVTKSFNRGEC

SEQ ID NO: 262 - protein, 214 aa, synthetic construct
DIQMTQSPSFLSASVGDRVTITCKASQNAGINVVWHQQKPGKAPKALIYSSSHRYSGVPSRFSGSGSGTEFTLTISSLQPEDFATYFCQQFKSYPLTFGQGTKLEIKRTVAAPSVFIFPPSDEQLKSGTASVVCLLNNFYPREAKVQWKVDNALQSGNSQESVTEQDSKDSTYSLSSTLTLSKADYEKHKVYACEVTHQGLSSPVTKSFNRGEC

SEQ ID NO: 263 - protein, 214 aa, synthetic construct
DIQMTQSPSFLSASVGDRVTITCKASQNDGINVVWHQQKPGKAPKALIYSSSHRYSGVPSRFSGSGSGTEFTLTISSLQPEDFATYFCQQFKSYPLTFGQGTKLEIKRTVAAPSVFIFPPSDEQLKSGTASVVCLLNNFYPREAKVQWKVDNALQSGNSQESVTEQDSKDSTYSLSSTLTLSKADYEKHKVYACEVTHQGLSSPVTKSFNRGEC

SEQ ID NO: 264 - protein, 214 aa, synthetic construct
DIQMTQSPSFLSASVGDRVTITCKASQNEGINVVWHQQKPGKAPKALIYSSSHRYSGVPSRFSGSGSGTEFTLTISSLQPEDFATYFCQQFKSYPLTFGQGTKLEIKRTVAAPSVFIFPPSDEQLKSGTASVVCLLNNFYPREAKVQWKVDNALQSGNSQESVTEQDSKDSTYSLSSTLTLSKADYEKHKVYACEVTHQGLSSPVTKSFNRGEC

SEQ ID NO: 265 - protein, 214 aa, synthetic construct
DIQMTQSPSFLSASVGDRVTITCKASQNFGINVVWHQQKPGKAPKALIYSSSHRYSGVPSRFSGSGSGTEFTLTISSLQPEDFATYFCQQFKSYPLTFGQGTKLEIKRTVAAPSVFIFPPSDEQLKSGTASVVCLLNNFYPREAKVQWKVDNALQSGNSQESVTEQDSKDSTYSLSSTLTLSKADYEKHKVYACEVTHQGLSSPVTKSFNRGEC

SEQ ID NO: 266 - protein, 214 aa, synthetic construct
DIQMTQSPSFLSASVGDRVTITCKASQNGGINVVWHQQKPGKAPKALIYSSSHRYSGVPSRFSGSGSGTEFTLTISSLQPEDFATYFCQQFKSYPLTFGQGTKLEIKRTVAAPSVFIFPPSDEQLKSGTASVVCLLNNFYPREAKVQWKVDNALQSGNSQESVTEQDSKDSTYSLSSTLTLSKADYEKHKVYACEVTHQGLSSPVTKSFNRGEC

SEQ ID NO: 267 - protein, 214 aa, synthetic construct
DIQMTQSPSFLSASVGDRVTITCKASQNHGINVVWHQQKPGKAPKALIYSSSHRYSGVPSRFSGSGSGTEFTLTISSLQPEDFATYFCQQFKSYPLTFGQGTKLEIKRTVAAPSVFIFPPSDEQLKSGTASVVCLLNNFYPREAKVQWKVDNALQSGNSQESVTEQDSKDSTYSLSSTLTLSKADYEKHKVYACEVTHQGLSSPVTKSFNRGEC

SEQ ID NO: 268 - protein, 214 aa, synthetic construct
DIQMTQSPSFLSASVGDRVTITCKASQNKGINVVWHQQKPGKAPKALIYSSSHRYSGVPSRFSGSGSGTEFTLTISSLQPEDFATYFCQQFKSYPLTFGQGTKLEIKRTVAAPSVFIFPPSDEQLKSGTASVVCLLNNFYPREAKVQWKVDNALQSGNSQESVTEQDSKDSTYSLSSTLTLSKADYEKHKVYACEVTHQGLSSPVTKSFNRGEC

SEQ ID NO: 269 - protein, 214 aa, synthetic construct
DIQMTQSPSFLSASVGDRVTITCKASQNLGINVVWHQQKPGKAPKALIYSSSHRYSGVPSRFSGSGSGTEFTLTISSLQPEDFATYFCQQFKSYPLTFGQGTKLEIKRTVAAPSVFIFPPSDEQLKSGTASVVCLLNNFYPREAKVQWKVDNALQSGNSQESVTEQDSKDSTYSLSSTLTLSKADYEKHKVYACEVTHQGLSSPVTKSFNRGEC

SEQ ID NO: 270 - protein, 214 aa, synthetic construct
DIQMTQSPSFLSASVGDRVTITCKASQNMGINVVWHQQKPGKAPKALIYSSSHRYSGVPSRFSGSGSGTEFTLTISSLQPEDFATYFCQQFKSYPLTFGQGTKLEIKRTVAAPSVFIFPPSDEQLKSGTASVVCLLNNFYPREAKVQWKVDNALQSGNSQESVTEQDSKDSTYSLSSTLTLSKADYEKHKVYACEVTHQGLSSPVTKSFNRGEC

SEQ ID NO: 271 - protein, 214 aa, synthetic construct
DIQMTQSPSFLSASVGDRVTITCKASQNPGINVVWHQQKPGKAPKALIYSSSHRYSGVPSRFSGSGSGTEFTLTISSLQPEDFATYFCQQFKSYPLTFGQGTKLEIKRTVAAPSVFIFPPSDEQLKSGTASVVCLLNNFYPREAKVQWKVDNALQSGNSQESVTEQDSKDSTYSLSSTLTLSKADYEKHKVYACEVTHQGLSSPVTKSFNRGEC

SEQ ID NO: 272 - protein, 214 aa, synthetic construct
DIQMTQSPSFLSASVGDRVTITCKASQNQGINVVWHQQKPGKAPKALIYSSSHRYSGVPSRFSGSGSGTEFTLTISSLQPEDFATYFCQQFKSYPLTFGQGTKLEIKRTVAAPSVFIFPPSDEQLKSGTASVVCLLNNFYPREAKVQWKVDNALQSGNSQESVTEQDSKDSTYSLSSTLTLSKADYEKHKVYACEVTHQGLSSPVTKSFNRGEC

SEQ ID NO: 273 - protein, 214 aa, synthetic construct
DIQMTQSPSFLSASVGDRVTITCKASQNSGINVVWHQQKPGKAPKALIYSSSHRYSGVPSRFSGSGSGTEFTLTISSLQPEDFATYFCQQFKSYPLTFGQGTKLEIKRTVAAPSVFIFPPSDEQLKSGTASVVCLLNNFYPREAKVQWKVDNALQSGNSQESVTEQDSKDSTYSLSSTLTLSKADYEKHKVYACEVTHQGLSSPVTKSFNRGEC

SEQ ID NO: 274 - protein, 214 aa, synthetic construct
DIQMTQSPSFLSASVGDRVTITCKASQNTGINVVWHQQKPGKAPKALIYSSSHRYSGVPSRFSGSGSGTEFTLTISSLQPEDFATYFCQQFKSYPLTFGQGTKLEIKRTVAAPSVFIFPPSDEQLKSGTASVVCLLNNFYPREAKVQWKVDNALQSGNSQESVTEQDSKDSTYSLSSTLTLSKADYEKHKVYACEVTHQGLSSPVTKSFNRGEC

SEQ ID NO: 275 - protein, 214 aa, synthetic construct
DIQMTQSPSFLSASVGDRVTITCKASQNVLINVVWHQQKPGKAPKALIYSSSHRYSGVPSRFSGSGSGTEFTLTISSLQPEDFATYFCQQFKSYPLTFGQGTKLEIKRTVAAPSVFIFPPSDEQLKSGTASVVCLLNNFYPREAKVQWKVDNALQSGNSQESVTEQDSKDSTYSLSSTLTLSKADYEKHKVYACEVTHQGLSSPVTKSFNRGEC

SEQ ID NO: 276 - protein, 214 aa, synthetic construct
DIQMTQSPSFLSASVGDRVTITCKASQNVMINVVWHQQKPGKAPKALIYSSSHRYSGVPSRFSGSGSGTEFTLTISSLQPEDFATYFCQQFKSYPLTFGQGTKLEIKRTVAAPSVFIFPPSDEQLKSGTASVVCLLNNFYPREAKVQWKVDNALQSGNSQESVTEQDSKDSTYSLSSTLTLSKADYEKHKVYACEVTHQGLSSPVTKSFNRGEC

SEQ ID NO: 277 - protein, 214 aa, synthetic construct
DIQMTQSPSFLSASVGDRVTITCKASQNVNINVVWHQQKPGKAPKALIYSSSHRYSGVPSRFSGSGSGTEFTLTISSLQPEDFATYFCQQFKSYPLTFGQGTKLEIKRTVAAPSVFIFPPSDEQLKSGTASVVCLLNNFYPREAKVQWKVDNALQSGNSQESVTEQDSKDSTYSLSSTLTLSKADYEKHKVYACEVTHQGLSSPVTKSFNRGEC

SEQ ID NO: 278 - protein, 214 aa, synthetic construct
DIQMTQSPSFLSASVGDRVTITCKASQNVPINVVWHQQKPGKAPKALIYSSSHRYSGVPSRFSGSGSGTEFTLTISSLQPEDFATYFCQQFKSYPLTFGQGTKLEIKRTVAAPSVFIFPPSDEQLKSGTASVVCLLNNFYPREAKVQWKVDNALQSGNSQESVTEQDSKDSTYSLSSTLTLSKADYEKHKVYACEVTHQGLSSPVTKSFNRGEC

SEQ ID NO: 279 - protein, 214 aa, synthetic construct
DIQMTQSPSFLSASVGDRVTITCKASQNVQINVVWHQQKPGKAPKALIYSSSHRYSGVPSRFSGSGSGTEFTLTISSLQPEDFATYFCQQFKSYPLTFGQGTKLEIKRTVAAPSVFIFPPSDEQLKSGTASVVCLLNNFYPREAKVQWKVDNALQSGNSQESVTEQDSKDSTYSLSSTLTLSKADYEKHKVYACEVTHQGLSSPVTKSFNRGEC

SEQ ID NO: 280 - protein, 214 aa, synthetic construct
DIQMTQSPSFLSASVGDRVTITCKASQNVRINVVWHQQKPGKAPKALIYSSSHRYSGVPSRFSGSGSGTEFTLTISSLQPEDFATYFCQQFKSYPLTFGQGTKLEIKRTVAAPSVFIFPPSDEQLKSGTASVVCLLNNFYPREAKVQWKVDNALQSGNSQESVTEQDSKDSTYSLSSTLTLSKADYEKHKVYACEVTHQGLSSPVTKSFNRGEC

SEQ ID NO: 281 - protein, 214 aa, synthetic construct
DIQMTQSPSFLSASVGDRVTITCKASQNVSINVVWHQQKPGKAPKALIYSSSHRYSGVPSRFSGSGSGTEFTLTISSLQPEDFATYFCQQFKSYPLTFGQGTKLEIKRTVAAPSVFIFPPSDEQLKSGTASVVCLLNNFYPREAKVQWKVDNALQSGNSQESVTEQDSKDSTYSLSSTLTLSKADYEKHKVYACEVTHQGLSSPVTKSFNRGEC

SEQ ID NO: 282 - protein, 214 aa, synthetic construct
DIQMTQSPSFLSASVGDRVTITCKASQNVVINVVWHQQKPGKAPKALIYSSSHRYSGVPSRFSGSGSGTEFTLTISSLQPEDFATYFCQQFKSYPLTFGQGTKLEIKRTVAAPSVFIFPPSDEQLKSGTASVVCLLNNFYPREAKVQWKVDNALQSGNSQESVTEQDSKDSTYSLSSTLTLSKADYEKHKVYACEVTHQGLSSPVTKSFNRGEC

SEQ ID NO: 283 - protein, 214 aa, synthetic construct
DIQMTQSPSFLSASVGDRVTITCKASQNVWINVVWHQQKPGKAPKALIYSSSHRYSGVPSRFSGSGSGTEFTLTISSLQPEDFATYFCQQFKSYPLTFGQGTKLEIKRTVAAPSVFIFPPSDEQLKSGTASVVCLLNNFYPREAKVQWKVDNALQSGNSQESVTEQDSKDSTYSLSSTLTLSKADYEKHKVYACEVTHQGLSSPVTKSFNRGEC

SEQ ID NO: 284 - protein, 214 aa, synthetic construct
DIQMTQSPSFLSASVGDRVTITCKASQNVGANVVWHQQKPGKAPKALIYSSSHRYSGVPSRFSGSGSGTEFTLTISSLQPEDFATYFCQQFKSYPLTFGQGTKLEIKRTVAAPSVFIFPPSDEQLKSGTASVVCLLNNFYPREAKVQWKVDNALQSGNSQESVTEQDSKDSTYSLSSTLTLSKADYEKHKVYACEVTHQGLSSPVTKSFNRGEC

SEQ ID NO: 285 - protein, 214 aa, synthetic construct
DIQMTQSPSFLSASVGDRVTITCKASQNVGENVVWHQQKPGKAPKALIYSSSHRYSGVPSRFSGSGSGTEFTLTISSLQPEDFATYFCQQFKSYPLTFGQGTKLEIKRTVAAPSVFIFPPSDEQLKSGTASVVCLLNNFYPREAKVQWKVDNALQSGNSQESVTEQDSKDSTYSLSSTLTLSKADYEKHKVYACEVTHQGLSSPVTKSFNRGEC

SEQ ID NO: 286 - protein, 214 aa, synthetic construct
DIQMTQSPSFLSASVGDRVTITCKASQNVGFNVVWHQQKPGKAPKALIYSSSHRYSGVPSRFSGSGSGTEFTLTISSLQPEDFATYFCQQFKSYPLTFGQGTKLEIKRTVAAPSVFIFPPSDEQLKSGTASVVCLLNNFYPREAKVQWKVDNALQSGNSQESVTEQDSKDSTYSLSSTLTLSKADYEKHKVYACEVTHQGLSSPVTKSFNRGEC

SEQ ID NO: 287 - protein, 214 aa, synthetic construct
DIQMTQSPSFLSASVGDRVTITCKASQNVGGNVVWHQQKPGKAPKALIYSSSHRYSGVPSRFSGSGSGTEFTLTISSLQPEDFATYFCQQFKSYPLTFGQGTKLEIKRTVAAPSVFIFPPSDEQLKSGTASVVCLLNNFYPREAKVQWKVDNALQSGNSQESVTEQDSKDSTYSLSSTLTLSKADYEKHKVYACEVTHQGLSSPVTKSFNRGEC

SEQ ID NO: 288 - protein, 214 aa, synthetic construct
DIQMTQSPSFLSASVGDRVTITCKASQNVGHNVVWHQQKPGKAPKALIYSSSHRYSGVPSRFSGSGSGTEFTLTISSLQPEDFATYFCQQFKSYPLTFGQGTKLEIKRTVAAPSVFIFPPSDEQLKSGTASVVCLLNNFYPREAKVQWKVDNALQSGNSQESVTEQDSKDSTYSLSSTLTLSKADYEKHKVYACEVTHQGLSSPVTKSFNRGEC

SEQ ID NO: 289 - protein, 214 aa, synthetic construct
DIQMTQSPSFLSASVGDRVTITCKASQNVGKNVVWHQQKPGKAPKALIYSSSHRYSGVPSRFSGSGSGTEFTLTISSLQPEDFATYFCQQFKSYPLTFGQGTKLEIKRTVAAPSVFIFPPSDEQLKSGTASVVCLLNNFYPREAKVQWKVDNALQSGNSQESVTEQDSKDSTYSLSSTLTLSKADYEKHKVYACEVTHQGLSSPVTKSFNRGEC

SEQ ID NO: 290 - protein, 214 aa, synthetic construct
DIQMTQSPSFLSASVGDRVTITCKASQNVGLNVVWHQQKPGKAPKALIYSSSHRYSGVPSRFSGSGSGTEFTLTISSLQPEDFATYFCQQFKSYPLTFGQGTKLEIKRTVAAPSVFIFPPSDEQLKSGTASVVCLLNNFYPREAKVQWKVDNALQSGNSQESVTEQDSKDSTYSLSSTLTLSKADYEKHKVYACEVTHQGLSSPVTKSFNRGEC

SEQ ID NO: 291 - protein, 214 aa, synthetic construct
DIQMTQSPSFLSASVGDRVTITCKASQNVGMNVVWHQQKPGKAPKALIYSSSHRYSGVPSRFSGSGSGTEFTLTISSLQPEDFATYFCQQFKSYPLTFGQGTKLEIKRTVAAPSVFIFPPSDEQLKSGTASVVCLLNNFYPREAKVQWKVDNALQSGNSQESVTEQDSKDSTYSLSSTLTLSKADYEKHKVYACEVTHQGLSSPVTKSFNRGEC

SEQ ID NO: 292 - protein, 214 aa, synthetic construct
DIQMTQSPSFLSASVGDRVTITCKASQNVGNNVVWHQQKPGKAPKALIYSSSHRYSGVPSRFSGSGSGTEFTLTISSLQPEDFATYFCQQFKSYPLTFGQGTKLEIKRTVAAPSVFIFPPSDEQLKSGTASVVCLLNNFYPREAKVQWKVDNALQSGNSQESVTEQDSKDSTYSLSSTLTLSKADYEKHKVYACEVTHQGLSSPVTKSFNRGEC

SEQ ID NO: 293 - protein, 214 aa, synthetic construct
DIQMTQSPSFLSASVGDRVTITCKASQNVGPNVVWHQQKPGKAPKALIYSSSHRYSGVPSRFSGSGSGTEFTLTISSLQPEDFATYFCQQFKSYPLTFGQGTKLEIKRTVAAPSVFIFPPSDEQLKSGTASVVCLLNNFYPREAKVQWKVDNALQSGNSQESVTEQDSKDSTYSLSSTLTLSKADYEKHKVYACEVTHQGLSSPVTKSFNRGEC

SEQ ID NO: 294 - protein, 214 aa, synthetic construct
DIQMTQSPSFLSASVGDRVTITCKASQNVGQNVVWHQQKPGKAPKALIYSSSHRYSGVPSRFSGSGSGTEFTLTISSLQPEDFATYFCQQFKSYPLTFGQGTKLEIKRTVAAPSVFIFPPSDEQLKSGTASVVCLLNNFYPREAKVQWKVDNALQSGNSQESVTEQDSKDSTYSLSSTLTLSKADYEKHKVYACEVTHQGLSSPVTKSFNRGEC

SEQ ID NO: 295 - protein, 214 aa, synthetic construct
DIQMTQSPSFLSASVGDRVTITCKASQNVGSNVVWHQQKPGKAPKALIYSSSHRYSGVPSRFSGSGSGTEFTLTISSLQPEDFATYFCQQFKSYPLTFGQGTKLEIKRTVAAPSVFIFPPSDEQLKSGTASVVCLLNNFYPREAKVQWKVDNALQSGNSQESVTEQDSKDSTYSLSSTLTLSKADYEKHKVYACEVTHQGLSSPVTKSFNRGEC

SEQ ID NO: 296 - protein, 214 aa, synthetic construct
DIQMTQSPSFLSASVGDRVTITCKASQNVGVNVVWHQQKPGKAPKALIYSSSHRYSGVPSRFSGSGSGTEFTLTISSLQPEDFATYFCQQFKSYPLTFGQGTKLEIKRTVAAPSVFIFPPSDEQLKSGTASVVCLLNNFYPREAKVQWKVDNALQSGNSQESVTEQDSKDSTYSLSSTLTLSKADYEKHKVYACEVTHQGLSSPVTKSFNRGEC

SEQ ID NO: 297 - protein, 214 aa, synthetic construct
DIQMTQSPSFLSASVGDRVTITCKASQNVGWNVVWHQQKPGKAPKALIYSSSHRYSGVPSRFSGSGSGTEFTLTISSLQPEDFATYFCQQFKSYPLTFGQGTKLEIKRTVAAPSVFIFPPSDEQLKSGTASVVCLLNNFYPREAKVQWKVDNALQSGNSQESVTEQDSKDSTYSLSSTLTLSKADYEKHKVYACEVTHQGLSSPVTKSFNRGEC

SEQ ID NO: 298 - protein, 214 aa, synthetic construct
DIQMTQSPSFLSASVGDRVTITCKASQNVGYNVVWHQQKPGKAPKALIYSSSHRYSGVPSRFSGSGSGTEFTLTISSLQPEDFATYFCQQFKSYPLTFGQGTKLEIKRTVAAPSVFIFPPSDEQLKSGTASVVCLLNNFYPREAKVQWKVDNALQSGNSQESVTEQDSKDSTYSLSSTLTLSKADYEKHKVYACEVTHQGLSSPVTKSFNRGEC

SEQ ID NO: 299 - protein, 214 aa, synthetic construct
DIQMTQSPSFLSASVGDRVTITCKASQNVGIAVVWHQQKPGKAPKALIYSSSHRYSGVPSRFSGSGSGTEFTLTISSLQPEDFATYFCQQFKSYPLTFGQGTKLEIKRTVAAPSVFIFPPSDEQLKSGTASVVCLLNNFYPREAKVQWKVDNALQSGNSQESVTEQDSKDSTYSLSSTLTLSKADYEKHKVYACEVTHQGLSSPVTKSFNRGEC

SEQ ID NO: 300 - protein, 214 aa, synthetic construct
DIQMTQSPSFLSASVGDRVTITCKASQNVGIDVVWHQQKPGKAPKALIYSSSHRYSGVPSRFSGSGSGTEFTLTISSLQPEDFATYFCQQFKSYPLTFGQGTKLEIKRTVAAPSVFIFPPSDEQLKSGTASVVCLLNNFYPREAKVQWKVDNALQSGNSQESVTEQDSKDSTYSLSSTLTLSKADYEKHKVYACEVTHQGLSSPVTKSFNRGEC

SEQ ID NO: 301 - protein, 214 aa, synthetic construct
DIQMTQSPSFLSASVGDRVTITCKASQNVGIEVVWHQQKPGKAPKALIYSSSHRYSGVPSRFSGSGSGTEFTLTISSLQPEDFATYFCQQFKSYPLTFGQGTKLEIKRTVAAPSVFIFPPSDEQLKSGTASVVCLLNNFYPREAKVQWKVDNALQSGNSQESVTEQDSKDSTYSLSSTLTLSKADYEKHKVYACEVTHQGLSSPVTKSFNRGEC

SEQ ID NO: 302 - protein, 214 aa, synthetic construct
DIQMTQSPSFLSASVGDRVTITCKASQNVGIFVVWHQQKPGKAPKALIYSSSHRYSGVPSRFSGSGSGTEFTLTISSLQPEDFATYFCQQFKSYPLTFGQGTKLEIKRTVAAPSVFIFPPSDEQLKSGTASVVCLLNNFYPREAKVQWKVDNALQSGNSQESVTEQDSKDSTYSLSSTLTLSKADYEKHKVYACEVTHQGLSSPVTKSFNRGEC

SEQ ID NO: 303 - protein, 214 aa, synthetic construct
DIQMTQSPSFLSASVGDRVTITCKASQNVGIHVVWHQQKPGKAPKALIYSSSHRYSGVPSRFSGSGSGTEFTLTISSLQPEDFATYFCQQFKSYPLTFGQGTKLEIKRTVAAPSVFIFPPSDEQLKSGTASVVCLLNNFYPREAKVQWKVDNALQSGNSQESVTEQDSKDSTYSLSSTLTLSKADYEKHKVYACEVTHQGLSSPVTKSFNRGEC

SEQ ID NO: 304 - protein, 214 aa, synthetic construct
DIQMTQSPSFLSASVGDRVTITCKASQNVGIKVVWHQQKPGKAPKALIYSSSHRYSGVPSRFSGSGSGTEFTLTISSLQPEDFATYFCQQFKSYPLTFGQGTKLEIKRTVAAPSVFIFPPSDEQLKSGTASVVCLLNNFYPREAKVQWKVDNALQSGNSQESVTEQDSKDSTYSLSSTLTLSKADYEKHKVYACEVTHQGLSSPVTKSFNRGEC

SEQ ID NO: 305 - protein, 214 aa, synthetic construct
DIQMTQSPSFLSASVGDRVTITCKASQNVGILVVWHQQKPGKAPKALIYSSSHRYSGVPSRFSGSGSGTEFTLTISSLQPEDFATYFCQQFKSYPLTFGQGTKLEIKRTVAAPSVFIFPPSDEQLKSGTASVVCLLNNFYPREAKVQWKVDNALQSGNSQESVTEQDSKDSTYSLSSTLTLSKADYEKHKVYACEVTHQGLSSPVTKSFNRGEC

SEQ ID NO: 306 - protein, 214 aa, synthetic construct
DIQMTQSPSFLSASVGDRVTITCKASQNVGIMVVWHQQKPGKAPKALIYSSSHRYSGVPSRFSGSGSGTEFTLTISSLQPEDFATYFCQQFKSYPLTFGQGTKLEIKRTVAAPSVFIFPPSDEQLKSGTASVVCLLNNFYPREAKVQWKVDNALQSGNSQESVTEQDSKDSTYSLSSTLTLSKADYEKHKVYACEVTHQGLSSPVTKSFNRGEC

SEQ ID NO: 307 - protein, 214 aa, synthetic construct
DIQMTQSPSFLSASVGDRVTITCKASQNVGIPVVWHQQKPGKAPKALIYSSSHRYSGVPSRFSGSGSGTEFTLTISSLQPEDFATYFCQQFKSYPLTFGQGTKLEIKRTVAAPSVFIFPPSDEQLKSGTASVVCLLNNFYPREAKVQWKVDNALQSGNSQESVTEQDSKDSTYSLSSTLTLSKADYEKHKVYACEVTHQGLSSPVTKSFNRGEC

SEQ ID NO: 308 - protein, 214 aa, synthetic construct
DIQMTQSPSFLSASVGDRVTITCKASQNVGIQVVWHQQKPGKAPKALIYSSSHRYSGVPSRFSGSGSGTEFTLTISSLQPEDFATYFCQQFKSYPLTFGQGTKLEIKRTVAAPSVFIFPPSDEQLKSGTASVVCLLNNFYPREAKVQWKVDNALQSGNSQESVTEQDSKDSTYSLSSTLTLSKADYEKHKVYACEVTHQGLSSPVTKSFNRGEC

SEQ ID NO: 309 - protein, 214 aa, synthetic construct
DIQMTQSPSFLSASVGDRVTITCKASQNVGISVVWHQQKPGKAPKALIYSSSHRYSGVPSRFSGSGSGTEFTLTISSLQPEDFATYFCQQFKSYPLTFGQGTKLEIKRTVAAPSVFIFPPSDEQLKSGTASVVCLLNNFYPREAKVQWKVDNALQSGNSQESVTEQDSKDSTYSLSSTLTLSKADYEKHKVYACEVTHQGLSSPVTKSFNRGEC

SEQ ID NO: 310 - protein, 214 aa, synthetic construct
DIQMTQSPSFLSASVGDRVTITCKASQNVGITVVWHQQKPGKAPKALIYSSSHRYSGVPSRFSGSGSGTEFTLTISSLQPEDFATYFCQQFKSYPLTFGQGTKLEIKRTVAAPSVFIFPPSDEQLKSGTASVVCLLNNFYPREAKVQWKVDNALQSGNSQESVTEQDSKDSTYSLSSTLTLSKADYEKHKVYACEVTHQGLSSPVTKSFNRGEC

SEQ ID NO: 311 - protein, 214 aa, synthetic construct
DIQMTQSPSFLSASVGDRVTITCKASQNVGIVVVWHQQKPGKAPKALIYSSSHRYSGVPSRFSGSGSGTEFTLTISSLQPEDFATYFCQQFKSYPLTFGQGTKLEIKRTVAAPSVFIFPPSDEQLKSGTASVVCLLNNFYPREAKVQWKVDNALQSGNSQESVTEQDSKDSTYSLSSTLTLSKADYEKHKVYACEVTHQGLSSPVTKSFNRGEC

SEQ ID NO: 312 - protein, 214 aa, synthetic construct
DIQMTQSPSFLSASVGDRVTITCKASQNVGIWVVWHQQKPGKAPKALIYSSSHRYSGVPSRFSGSGSGTEFTLTISSLQPEDFATYFCQQFKSYPLTFGQGTKLEIKRTVAAPSVFIFPPSDEQLKSGTASVVCLLNNFYPREAKVQWKVDNALQSGNSQESVTEQDSKDSTYSLSSTLTLSKADYEKHKVYACEVTHQGLSSPVTKSFNRGEC

SEQ ID NO: 313 - protein, 214 aa, synthetic construct
DIQMTQSPSFLSASVGDRVTITCKASQNVGIYVVWHQQKPGKAPKALIYSSSHRYSGVPSRFSGSGSGTEFTLTISSLQPEDFATYFCQQFKSYPLTFGQGTKLEIKRTVAAPSVFIFPPSDEQLKSGTASVVCLLNNFYPREAKVQWKVDNALQSGNSQESVTEQDSKDSTYSLSSTLTLSKADYEKHKVYACEVTHQGLSSPVTKSFNRGEC

SEQ ID NO: 314 - protein, 214 aa, synthetic construct
DIQMTQSPSFLSASVGDRVTITCKASQNVGINAVWHQQKPGKAPKALIYSSSHRYSGVPSRFSGSGSGTEFTLTISSLQPEDFATYFCQQFKSYPLTFGQGTKLEIKRTVAAPSVFIFPPSDEQLKSGTASVVCLLNNFYPREAKVQWKVDNALQSGNSQESVTEQDSKDSTYSLSSTLTLSKADYEKHKVYACEVTHQGLSSPVTKSFNRGEC

SEQ ID NO: 315 - protein, 214 aa, synthetic construct
DIQMTQSPSFLSASVGDRVTITCKASQNVGINDVWHQQKPGKAPKALIYSSSHRYSGVPSRFSGSGSGTEFTLTISSLQPEDFATYFCQQFKSYPLTFGQGTKLEIKRTVAAPSVFIFPPSDEQLKSGTASVVCLLNNFYPREAKVQWKVDNALQSGNSQESVTEQDSKDSTYSLSSTLTLSKADYEKHKVYACEVTHQGLSSPVTKSFNRGEC

SEQ ID NO: 316 - protein, 214 aa, synthetic construct
DIQMTQSPSFLSASVGDRVTITCKASQNVGINEVWHQQKPGKAPKALIYSSSHRYSGVPSRFSGSGSGTEFTLTISSLQPEDFATYFCQQFKSYPLTFGQGTKLEIKRTVAAPSVFIFPPSDEQLKSGTASVVCLLNNFYPREAKVQWKVDNALQSGNSQESVTEQDSKDSTYSLSSTLTLSKADYEKHKVYACEVTHQGLSSPVTKSFNRGEC

SEQ ID NO: 317 - protein, 214 aa, synthetic construct
DIQMTQSPSFLSASVGDRVTITCKASQNVGINFVWHQQKPGKAPKALIYSSSHRYSGVPSRFSGSGSGTEFTLTISSLQPEDFATYFCQQFKSYPLTFGQGTKLEIKRTVAAPSVFIFPPSDEQLKSGTASVVCLLNNFYPREAKVQWKVDNALQSGNSQESVTEQDSKDSTYSLSSTLTLSKADYEKHKVYACEVTHQGLSSPVTKSFNRGEC

SEQ ID NO: 318 - protein, 214 aa, synthetic construct
DIQMTQSPSFLSASVGDRVTITCKASQNVGINGVWHQQKPGKAPKALIYSSSHRYSGVPSRFSGSGSGTEFTLTISSLQPEDFATYFCQQFKSYPLTFGQGTKLEIKRTVAAPSVFIFPPSDEQLKSGTASVVCLLNNFYPREAKVQWKVDNALQSGNSQESVTEQDSKDSTYSLSSTLTLSKADYEKHKVYACEVTHQGLSSPVTKSFNRGEC

SEQ ID NO: 319 - protein, 214 aa, synthetic construct
DIQMTQSPSFLSASVGDRVTITCKASQNVGINHVWHQQKPGKAPKALIYSSSHRYSGVPSRFSGSGSGTEFTLTISSLQPEDFATYFCQQFKSYPLTFGQGTKLEIKRTVAAPSVFIFPPSDEQLKSGTASVVCLLNNFYPREAKVQWKVDNALQSGNSQESVTEQDSKDSTYSLSSTLTLSKADYEKHKVYACEVTHQGLSSPVTKSFNRGEC

SEQ ID NO: 320 - protein, 214 aa, synthetic construct
DIQMTQSPSFLSASVGDRVTITCKASQNVGINKVWHQQKPGKAPKALIYSSSHRYSGVPSRFSGSGSGTEFTLTISSLQPEDFATYFCQQFKSYPLTFGQGTKLEIKRTVAAPSVFIFPPSDEQLKSGTASVVCLLNNFYPREAKVQWKVDNALQSGNSQESVTEQDSKDSTYSLSSTLTLSKADYEKHKVYACEVTHQGLSSPVTKSFNRGEC

SEQ ID NO: 321 - protein, 214 aa, synthetic construct
DIQMTQSPSFLSASVGDRVTITCKASQNVGINLVWHQQKPGKAPKALIYSSSHRYSGVPSRFSGSGSGTEFTLTISSLQPEDFATYFCQQFKSYPLTFGQGTKLEIKRTVAAPSVFIFPPSDEQLKSGTASVVCLLNNFYPREAKVQWKVDNALQSGNSQESVTEQDSKDSTYSLSSTLTLSKADYEKHKVYACEVTHQGLSSPVTKSFNRGEC

SEQ ID NO: 322 - protein, 214 aa, synthetic construct
DIQMTQSPSFLSASVGDRVTITCKASQNVGINNVWHQQKPGKAPKALIYSSSHRYSGVPSRFSGSGSGTEFTLTISSLQPEDFATYFCQQFKSYPLTFGQGTKLEIKRTVAAPSVFIFPPSDEQLKSGTASVVCLLNNFYPREAKVQWKVDNALQSGNSQESVTEQDSKDSTYSLSSTLTLSKADYEKHKVYACEVTHQGLSSPVTKSFNRGEC

SEQ ID NO: 323 - protein, 214 aa, synthetic construct
DIQMTQSPSFLSASVGDRVTITCKASQNVGINPVWHQQKPGKAPKALIYSSSHRYSGVPSRFSGSGSGTEFTLTISSLQPEDFATYFCQQFKSYPLTFGQGTKLEIKRTVAAPSVFIFPPSDEQLKSGTASVVCLLNNFYPREAKVQWKVDNALQSGNSQESVTEQDSKDSTYSLSSTLTLSKADYEKHKVYACEVTHQGLSSPVTKSFNRGEC

SEQ ID NO: 324 - protein, 214 aa, synthetic construct
DIQMTQSPSFLSASVGDRVTITCKASQNVGINQVWHQQKPGKAPKALIYSSSHRYSGVPSRFSGSGSGTEFTLTISSLQPEDFATYFCQQFKSYPLTFGQGTKLEIKRTVAAPSVFIFPPSDEQLKSGTASVVCLLNNFYPREAKVQWKVDNALQSGNSQESVTEQDSKDSTYSLSSTLTLSKADYEKHKVYACEVTHQGLSSPVTKSFNRGEC

SEQ ID NO: 325 - protein, 214 aa, synthetic construct
DIQMTQSPSFLSASVGDRVTITCKASQNVGINRVWHQQKPGKAPKALIYSSSHRYSGVPSRFSGSGSGTEFTLTISSLQPEDFATYFCQQFKSYPLTFGQGTKLEIKRTVAAPSVFIFPPSDEQLKSGTASVVCLLNNFYPREAKVQWKVDNALQSGNSQESVTEQDSKDSTYSLSSTLTLSKADYEKHKVYACEVTHQGLSSPVTKSFNRGEC

SEQ ID NO: 326 - protein, 214 aa, synthetic construct
DIQMTQSPSFLSASVGDRVTITCKASQNVGINSVWHQQKPGKAPKALIYSSSHRYSGVPSRFSGSGSGTEFTLTISSLQPEDFATYFCQQFKSYPLTFGQGTKLEIKRTVAAPSVFIFPPSDEQLKSGTASVVCLLNNFYPREAKVQWKVDNALQSGNSQESVTEQDSKDSTYSLSSTLTLSKADYEKHKVYACEVTHQGLSSPVTKSFNRGEC

SEQ ID NO: 327 - protein, 214 aa, synthetic construct
DIQMTQSPSFLSASVGDRVTITCKASQNVGINTVWHQQKPGKAPKALIYSSSHRYSGVPSRFSGSGSGTEFTLTISSLQPEDFATYFCQQFKSYPLTFGQGTKLEIKRTVAAPSVFIFPPSDEQLKSGTASVVCLLNNFYPREAKVQWKVDNALQSGNSQESVTEQDSKDSTYSLSSTLTLSKADYEKHKVYACEVTHQGLSSPVTKSFNRGEC

SEQ ID NO: 328 - protein, 214 aa, synthetic construct
DIQMTQSPSFLSASVGDRVTITCKASQNVGINWVWHQQKPGKAPKALIYSSSHRYSGVPSRFSGSGSGTEFTLTISSLQPEDFATYFCQQFKSYPLTFGQGTKLEIKRTVAAPSVFIFPPSDEQLKSGTASVVCLLNNFYPREAKVQWKVDNALQSGNSQESVTEQDSKDSTYSLSSTLTLSKADYEKHKVYACEVTHQGLSSPVTKSFNRGEC

SEQ ID NO: 329 - protein, 214 aa, synthetic construct
DIQMTQSPSFLSASVGDRVTITCKASQNVGINYVWHQQKPGKAPKALIYSSSHRYSGVPSRFSGSGSGTEFTLTISSLQPEDFATYFCQQFKSYPLTFGQGTKLEIKRTVAAPSVFIFPPSDEQLKSGTASVVCLLNNFYPREAKVQWKVDNALQSGNSQESVTEQDSKDSTYSLSSTLTLSKADYEKHKVYACEVTHQGLSSPVTKSFNRGEC

SEQ ID NO: 330 - protein, 214 aa, synthetic construct
DIQMTQSPSFLSASVGDRVTITCKASQNVGINVDWHQQKPGKAPKALIYSSSHRYSGVPSRFSGSGSGTEFTLTISSLQPEDFATYFCQQFKSYPLTFGQGTKLEIKRTVAAPSVFIFPPSDEQLKSGTASVVCLLNNFYPREAKVQWKVDNALQSGNSQESVTEQDSKDSTYSLSSTLTLSKADYEKHKVYACEVTHQGLSSPVTKSFNRGEC

SEQ ID NO: 331 - protein, 214 aa, synthetic construct
DIQMTQSPSFLSASVGDRVTITCKASQNVGINVFWHQQKPGKAPKALIYSSSHRYSGVPSRFSGSGSGTEFTLTISSLQPEDFATYFCQQFKSYPLTFGQGTKLEIKRTVAAPSVFIFPPSDEQLKSGTASVVCLLNNFYPREAKVQWKVDNALQSGNSQESVTEQDSKDSTYSLSSTLTLSKADYEKHKVYACEVTHQGLSSPVTKSFNRGEC

SEQ ID NO: 332 - protein, 214 aa, synthetic construct
DIQMTQSPSFLSASVGDRVTITCKASQNVGINVGWHQQKPGKAPKALIYSSSHRYSGVPSRFSGSGSGTEFTLTISSLQPEDFATYFCQQFKSYPLTFGQGTKLEIKRTVAAPSVFIFPPSDEQLKSGTASVVCLLNNFYPREAKVQWKVDNALQSGNSQESVTEQDSKDSTYSLSSTLTLSKADYEKHKVYACEVTHQGLSSPVTKSFNRGEC

SEQ ID NO: 333 - protein, 214 aa, synthetic construct
DIQMTQSPSFLSASVGDRVTITCKASQNVGINVHWHQQKPGKAPKALIYSSSHRYSGVPSRFSGSGSGTEFTLTISSLQPEDFATYFCQQFKSYPLTFGQGTKLEIKRTVAAPSVFIFPPSDEQLKSGTASVVCLLNNFYPREAKVQWKVDNALQSGNSQESVTEQDSKDSTYSLSSTLTLSKADYEKHKVYACEVTHQGLSSPVTKSFNRGEC

SEQ ID NO: 334 - protein, 214 aa, synthetic construct
DIQMTQSPSFLSASVGDRVTITCKASQNVGINVIWHQQKPGKAPKALIYSSSHRYSGVPSRFSGSGSGTEFTLTISSLQPEDFATYFCQQFKSYPLTFGQGTKLEIKRTVAAPSVFIFPPSDEQLKSGTASVVCLLNNFYPREAKVQWKVDNALQSGNSQESVTEQDSKDSTYSLSSTLTLSKADYEKHKVYACEVTHQGLSSPVTKSFNRGEC

SEQ ID NO: 335 - protein, 214 aa, synthetic construct
DIQMTQSPSFLSASVGDRVTITCKASQNVGINVKWHQQKPGKAPKALIYSSSHRYSGVPSRFSGSGSGTEFTLTISSLQPEDFATYFCQQFKSYPLTFGQGTKLEIKRTVAAPSVFIFPPSDEQLKSGTASVVCLLNNFYPREAKVQWKVDNALQSGNSQESVTEQDSKDSTYSLSSTLTLSKADYEKHKVYACEVTHQGLSSPVTKSFNRGEC

SEQ ID NO: 336 - protein, 214 aa, synthetic construct
DIQMTQSPSFLSASVGDRVTITCKASQNVGINVLWHQQKPGKAPKALIYSSSHRYSGVPSRFSGSGSGTEFTLTISSLQPEDFATYFCQQFKSYPLTFGQGTKLEIKRTVAAPSVFIFPPSDEQLKSGTASVVCLLNNFYPREAKVQWKVDNALQSGNSQESVTEQDSKDSTYSLSSTLTLSKADYEKHKVYACEVTHQGLSSPVTKSFNRGEC

SEQ ID NO: 337 - protein, 214 aa, synthetic construct
DIQMTQSPSFLSASVGDRVTITCKASQNVGINVNWHQQKPGKAPKALIYSSSHRYSGVPSRFSGSGSGTEFTLTISSLQPEDFATYFCQQFKSYPLTFGQGTKLEIKRTVAAPSVFIFPPSDEQLKSGTASVVCLLNNFYPREAKVQWKVDNALQSGNSQESVTEQDSKDSTYSLSSTLTLSKADYEKHKVYACEVTHQGLSSPVTKSFNRGEC

SEQ ID NO: 338 - protein, 214 aa, synthetic construct
DIQMTQSPSFLSASVGDRVTITCKASQNVGINVPWHQQKPGKAPKALIYSSSHRYSGVPSRFSGSGSGTEFTLTISSLQPEDFATYFCQQFKSYPLTFGQGTKLEIKRTVAAPSVFIFPPSDEQLKSGTASVVCLLNNFYPREAKVQWKVDNALQSGNSQESVTEQDSKDSTYSLSSTLTLSKADYEKHKVYACEVTHQGLSSPVTKSFNRGEC

SEQ ID NO: 339 - protein, 214 aa, synthetic construct
DIQMTQSPSFLSASVGDRVTITCKASQNVGINVQWHQQKPGKAPKALIYSSSHRYSGVPSRFSGSGSGTEFTLTISSLQPEDFATYFCQQFKSYPLTFGQGTKLEIKRTVAAPSVFIFPPSDEQLKSGTASVVCLLNNFYPREAKVQWKVDNALQSGNSQESVTEQDSKDSTYSLSSTLTLSKADYEKHKVYACEVTHQGLSSPVTKSFNRGEC

SEQ ID NO: 340 - protein, 214 aa, synthetic construct
DIQMTQSPSFLSASVGDRVTITCKASQNVGINVRWHQQKPGKAPKALIYSSSHRYSGVPSRFSGSGSGTEFTLTISSLQPEDFATYFCQQFKSYPLTFGQGTKLEIKRTVAAPSVFIFPPSDEQLKSGTASVVCLLNNFYPREAKVQWKVDNALQSGNSQESVTEQDSKDSTYSLSSTLTLSKADYEKHKVYACEVTHQGLSSPVTKSFNRGEC

SEQ ID NO: 341 - protein, 214 aa, synthetic construct
DIQMTQSPSFLSASVGDRVTITCKASQNVGINVSWHQQKPGKAPKALIYSSSHRYSGVPSRFSGSGSGTEFTLTISSLQPEDFATYFCQQFKSYPLTFGQGTKLEIKRTVAAPSVFIFPPSDEQLKSGTASVVCLLNNFYPREAKVQWKVDNALQSGNSQESVTEQDSKDSTYSLSSTLTLSKADYEKHKVYACEVTHQGLSSPVTKSFNRGEC

SEQ ID NO: 342 - protein, 214 aa, synthetic construct
DIQMTQSPSFLSASVGDRVTITCKASQNVGINVTWHQQKPGKAPKALIYSSSHRYSGVPSRFSGSGSGTEFTLTISSLQPEDFATYFCQQFKSYPLTFGQGTKLEIKRTVAAPSVFIFPPSDEQLKSGTASVVCLLNNFYPREAKVQWKVDNALQSGNSQESVTEQDSKDSTYSLSSTLTLSKADYEKHKVYACEVTHQGLSSPVTKSFNRGEC

SEQ ID NO: 343 - protein, 214 aa, synthetic construct
DIQMTQSPSFLSASVGDRVTITCKASQNVGINVWWHQQKPGKAPKALIYSSSHRYSGVPSRFSGSGSGTEFTLTISSLQPEDFATYFCQQFKSYPLTFGQGTKLEIKRTVAAPSVFIFPPSDEQLKSGTASVVCLLNNFYPREAKVQWKVDNALQSGNSQESVTEQDSKDSTYSLSSTLTLSKADYEKHKVYACEVTHQGLSSPVTKSFNRGEC

SEQ ID NO: 344 - protein, 214 aa, synthetic construct
DIQMTQSPSFLSASVGDRVTITCKASQNVGINVYWHQQKPGKAPKALIYSSSHRYSGVPSRFSGSGSGTEFTLTISSLQPEDFATYFCQQFKSYPLTFGQGTKLEIKRTVAAPSVFIFPPSDEQLKSGTASVVCLLNNFYPREAKVQWKVDNALQSGNSQESVTEQDSKDSTYSLSSTLTLSKADYEKHKVYACEVTHQGLSSPVTKSFNRGEC

SEQ ID NO: 345 - protein, 214 aa, synthetic construct
DIQMTQSPSFLSASVGDRVTITCKASQNVGINVVWHQQKPGKAPKALIYASSHRYSGVPSRFSGSGSGTEFTLTISSLQPEDFATYFCQQFKSYPLTFGQGTKLEIKRTVAAPSVFIFPPSDEQLKSGTASVVCLLNNFYPREAKVQWKVDNALQSGNSQESVTEQDSKDSTYSLSSTLTLSKADYEKHKVYACEVTHQGLSSPVTKSFNRGEC

SEQ ID NO: 346 - protein, 214 aa, synthetic construct
DIQMTQSPSFLSASVGDRVTITCKASQNVGINVVWHQQKPGKAPKALIYESSHRYSGVPSRFSGSGSGTEFTLTISSLQPEDFATYFCQQFKSYPLTFGQGTKLEIKRTVAAPSVFIFPPSDEQLKSGTASVVCLLNNFYPREAKVQWKVDNALQSGNSQESVTEQDSKDSTYSLSSTLTLSKADYEKHKVYACEVTHQGLSSPVTKSFNRGEC

SEQ ID NO: 347 - protein, 214 aa, synthetic construct
DIQMTQSPSFLSASVGDRVTITCKASQNVGINVVWHQQKPGKAPKALIYFSSHRYSGVPSRFSGSGSGTEFTLTISSLQPEDFATYFCQQFKSYPLTFGQGTKLEIKRTVAAPSVFIFPPSDEQLKSGTASVVCLLNNFYPREAKVQWKVDNALQSGNSQESVTEQDSKDSTYSLSSTLTLSKADYEKHKVYACEVTHQGLSSPVTKSFNRGEC

SEQ ID NO: 348 - protein, 214 aa, synthetic construct
DIQMTQSPSFLSASVGDRVTITCKASQNVGINVVWHQQKPGKAPKALIYGSSHRYSGVPSRFSGSGSGTEFTLTISSLQPEDFATYFCQQFKSYPLTFGQGTKLEIKRTVAAPSVFIFPPSDEQLKSGTASVVCLLNNFYPREAKVQWKVDNALQSGNSQESVTEQDSKDSTYSLSSTLTLSKADYEKHKVYACEVTHQGLSSPVTKSFNRGEC

SEQ ID NO: 349 - protein, 214 aa, synthetic construct
DIQMTQSPSFLSASVGDRVTITCKASQNVGINVVWHQQKPGKAPKALIYHSSHRYSGVPSRFSGSGSGTEFTLTISSLQPEDFATYFCQQFKSYPLTFGQGTKLEIKRTVAAPSVFIFPPSDEQLKSGTASVVCLLNNFYPREAKVQWKVDNALQSGNSQESVTEQDSKDSTYSLSSTLTLSKADYEKHKVYACEVTHQGLSSPVTKSFNRGEC

SEQ ID NO: 350 - protein, 214 aa, synthetic construct
DIQMTQSPSFLSASVGDRVTITCKASQNVGINVVWHQQKPGKAPKALIYKSSHRYSGVPSRFSGSGSGTEFTLTISSLQPEDFATYFCQQFKSYPLTFGQGTKLEIKRTVAAPSVFIFPPSDEQLKSGTASVVCLLNNFYPREAKVQWKVDNALQSGNSQESVTEQDSKDSTYSLSSTLTLSKADYEKHKVYACEVTHQGLSSPVTKSFNRGEC

SEQ ID NO: 351 - protein, 214 aa, synthetic construct
DIQMTQSPSFLSASVGDRVTITCKASQNVGINVVWHQQKPGKAPKALIYLSSHRYSGVPSRFSGSGSGTEFTLTISSLQPEDFATYFCQQFKSYPLTFGQGTKLEIKRTVAAPSVFIFPPSDEQLKSGTASVVCLLNNFYPREAKVQWKVDNALQSGNSQESVTEQDSKDSTYSLSSTLTLSKADYEKHKVYACEVTHQGLSSPVTKSFNRGEC

SEQ ID NO: 352 - protein, 214 aa, synthetic construct
DIQMTQSPSFLSASVGDRVTITCKASQNVGINVVWHQQKPGKAPKALIYMSSHRYSGVPSRFSGSGSGTEFTLTISSLQPEDFATYFCQQFKSYPLTFGQGTKLEIKRTVAAPSVFIFPPSDEQLKSGTASVVCLLNNFYPREAKVQWKVDNALQSGNSQESVTEQDSKDSTYSLSSTLTLSKADYEKHKVYACEVTHQGLSSPVTKSFNRGEC

SEQ ID NO: 353 - protein, 214 aa, synthetic construct
DIQMTQSPSFLSASVGDRVTITCKASQNVGINVVWHQQKPGKAPKALIYPSSHRYSGVPSRFSGSGSGTEFTLTISSLQPEDFATYFCQQFKSYPLTFGQGTKLEIKRTVAAPSVFIFPPSDEQLKSGTASVVCLLNNFYPREAKVQWKVDNALQSGNSQESVTEQDSKDSTYSLSSTLTLSKADYEKHKVYACEVTHQGLSSPVTKSFNRGEC

SEQ ID NO: 354 - protein, 214 aa, synthetic construct
DIQMTQSPSFLSASVGDRVTITCKASQNVGINVVWHQQKPGKAPKALIYQSSHRYSGVPSRFSGSGSGTEFTLTISSLQPEDFATYFCQQFKSYPLTFGQGTKLEIKRTVAAPSVFIFPPSDEQLKSGTASVVCLLNNFYPREAKVQWKVDNALQSGNSQESVTEQDSKDSTYSLSSTLTLSKADYEKHKVYACEVTHQGLSSPVTKSFNRGEC

SEQ ID NO: 355 - protein, 214 aa, synthetic construct
DIQMTQSPSFLSASVGDRVTITCKASQNVGINVVWHQQKPGKAPKALIYTSSHRYSGVPSRFSGSGSGTEFTLTISSLQPEDFATYFCQQFKSYPLTFGQGTKLEIKRTVAAPSVFIFPPSDEQLKSGTASVVCLLNNFYPREAKVQWKVDNALQSGNSQESVTEQDSKDSTYSLSSTLTLSKADYEKHKVYACEVTHQGLSSPVTKSFNRGEC

SEQ ID NO: 356 - protein, 214 aa, synthetic construct
DIQMTQSPSFLSASVGDRVTITCKASQNVGINVVWHQQKPGKAPKALIYVSSHRYSGVPSRFSGSGSGTEFTLTISSLQPEDFATYFCQQFKSYPLTFGQGTKLEIKRTVAAPSVFIFPPSDEQLKSGTASVVCLLNNFYPREAKVQWKVDNALQSGNSQESVTEQDSKDSTYSLSSTLTLSKADYEKHKVYACEVTHQGLSSPVTKSFNRGEC

SEQ ID NO: 357 - protein, 214 aa, synthetic construct
DIQMTQSPSFLSASVGDRVTITCKASQNVGINVVWHQQKPGKAPKALIYWSSHRYSGVPSRFSGSGSGTEFTLTISSLQPEDFATYFCQQFKSYPLTFGQGTKLEIKRTVAAPSVFIFPPSDEQLKSGTASVVCLLNNFYPREAKVQWKVDNALQSGNSQESVTEQDSKDSTYSLSSTLTLSKADYEKHKVYACEVTHQGLSSPVTKSFNRGEC

SEQ ID NO: 358 - protein, 214 aa, synthetic construct
DIQMTQSPSFLSASVGDRVTITCKASQNVGINVVWHQQKPGKAPKALIYYSSHRYSGVPSRFSGSGSGTEFTLTISSLQPEDFATYFCQQFKSYPLTFGQGTKLEIKRTVAAPSVFIFPPSDEQLKSGTASVVCLLNNFYPREAKVQWKVDNALQSGNSQESVTEQDSKDSTYSLSSTLTLSKADYEKHKVYACEVTHQGLSSPVTKSFNRGEC

SEQ ID NO: 359 - protein, 214 aa, synthetic construct
DIQMTQSPSFLSASVGDRVTITCKASQNVGINVVWHQQKPGKAPKALIYSSAHRYSGVPSRFSGSGSGTEFTLTISSLQPEDFATYFCQQFKSYPLTFGQGTKLEIKRTVAAPSVFIFPPSDEQLKSGTASVVCLLNNFYPREAKVQWKVDNALQSGNSQESVTEQDSKDSTYSLSSTLTLSKADYEKHKVYACEVTHQGLSSPVTKSFNRGEC

SEQ ID NO: 360 - protein, 214 aa, synthetic construct
DIQMTQSPSFLSASVGDRVTITCKASQNVGINVVWHQQKPGKAPKALIYSSDHRYSGVPSRFSGSGSGTEFTLTISSLQPEDFATYFCQQFKSYPLTFGQGTKLEIKRTVAAPSVFIFPPSDEQLKSGTASVVCLLNNFYPREAKVQWKVDNALQSGNSQESVTEQDSKDSTYSLSSTLTLSKADYEKHKVYACEVTHQGLSSPVTKSFNRGEC

SEQ ID NO: 361 - protein, 214 aa, synthetic construct
DIQMTQSPSFLSASVGDRVTITCKASQNVGINVVWHQQKPGKAPKALIYSSEHRYSGVPSRFSGSGSGTEFTLTISSLQPEDFATYFCQQFKSYPLTFGQGTKLEIKRTVAAPSVFIFPPSDEQLKSGTASVVCLLNNFYPREAKVQWKVDNALQSGNSQESVTEQDSKDSTYSLSSTLTLSKADYEKHKVYACEVTHQGLSSPVTKSFNRGEC

SEQ ID NO: 362 - protein, 214 aa, synthetic construct
DIQMTQSPSFLSASVGDRVTITCKASQNVGINVVWHQQKPGKAPKALIYSSFHRYSGVPSRFSGSGSGTEFTLTISSLQPEDFATYFCQQFKSYPLTFGQGTKLEIKRTVAAPSVFIFPPSDEQLKSGTASVVCLLNNFYPREAKVQWKVDNALQSGNSQESVTEQDSKDSTYSLSSTLTLSKADYEKHKVYACEVTHQGLSSPVTKSFNRGEC

SEQ ID NO: 363 - protein, 214 aa, synthetic construct
DIQMTQSPSFLSASVGDRVTITCKASQNVGINVVWHQQKPGKAPKALIYSSGHRYSGVPSRFSGSGSGTEFTLTISSLQPEDFATYFCQQFKSYPLTFGQGTKLEIKRTVAAPSVFIFPPSDEQLKSGTASVVCLLNNFYPREAKVQWKVDNALQSGNSQESVTEQDSKDSTYSLSSTLTLSKADYEKHKVYACEVTHQGLSSPVTKSFNRGEC

SEQ ID NO: 364 - protein, 214 aa, synthetic construct
DIQMTQSPSFLSASVGDRVTITCKASQNVGINVVWHQQKPGKAPKALIYSSHHRYSGVPSRFSGSGSGTEFTLTISSLQPEDFATYFCQQFKSYPLTFGQGTKLEIKRTVAAPSVFIFPPSDEQLKSGTASVVCLLNNFYPREAKVQWKVDNALQSGNSQESVTEQDSKDSTYSLSSTLTLSKADYEKHKVYACEVTHQGLSSPVTKSFNRGEC

SEQ ID NO: 365 - protein, 214 aa, synthetic construct
DIQMTQSPSFLSASVGDRVTITCKASQNVGINVVWHQQKPGKAPKALIYSSIHRYSGVPSRFSGSGSGTEFTLTISSLQPEDFATYFCQQFKSYPLTFGQGTKLEIKRTVAAPSVFIFPPSDEQLKSGTASVVCLLNNFYPREAKVQWKVDNALQSGNSQESVTEQDSKDSTYSLSSTLTLSKADYEKHKVYACEVTHQGLSSPVTKSFNRGEC

SEQ ID NO: 366 - protein, 214 aa, synthetic construct
DIQMTQSPSFLSASVGDRVTITCKASQNVGINVVWHQQKPGKAPKALIYSSKHRYSGVPSRFSGSGSGTEFTLTISSLQPEDFATYFCQQFKSYPLTFGQGTKLEIKRTVAAPSVFIFPPSDEQLKSGTASVVCLLNNFYPREAKVQWKVDNALQSGNSQESVTEQDSKDSTYSLSSTLTLSKADYEKHKVYACEVTHQGLSSPVTKSFNRGEC

SEQ ID NO: 367 - protein, 214 aa, synthetic construct
DIQMTQSPSFLSASVGDRVTITCKASQNVGINVVWHQQKPGKAPKALIYSSLHRYSGVPSRFSGSGSGTEFTLTISSLQPEDFATYFCQQFKSYPLTFGQGTKLEIKRTVAAPSVFIFPPSDEQLKSGTASVVCLLNNFYPREAKVQWKVDNALQSGNSQESVTEQDSKDSTYSLSSTLTLSKADYEKHKVYACEVTHQGLSSPVTKSFNRGEC

SEQ ID NO: 368 - protein, 214 aa, synthetic construct
DIQMTQSPSFLSASVGDRVTITCKASQNVGINVVWHQQKPGKAPKALIYSSMHRYSGVPSRFSGSGSGTEFTLTISSLQPEDFATYFCQQFKSYPLTFGQGTKLEIKRTVAAPSVFIFPPSDEQLKSGTASVVCLLNNFYPREAKVQWKVDNALQSGNSQESVTEQDSKDSTYSLSSTLTLSKADYEKHKVYACEVTHQGLSSPVTKSFNRGEC

SEQ ID NO: 369 - protein, 214 aa, synthetic construct
DIQMTQSPSFLSASVGDRVTITCKASQNVGINVVWHQQKPGKAPKALIYSSNHRYSGVPSRFSGSGSGTEFTLTISSLQPEDFATYFCQQFKSYPLTFGQGTKLEIKRTVAAPSVFIFPPSDEQLKSGTASVVCLLNNFYPREAKVQWKVDNALQSGNSQESVTEQDSKDSTYSLSSTLTLSKADYEKHKVYACEVTHQGLSSPVTKSFNRGEC

SEQ ID NO: 370 - protein, 214 aa, synthetic construct
DIQMTQSPSFLSASVGDRVTITCKASQNVGINVVWHQQKPGKAPKALIYSSPHRYSGVPSRFSGSGSGTEFTLTISSLQPEDFATYFCQQFKSYPLTFGQGTKLEIKRTVAAPSVFIFPPSDEQLKSGTASVVCLLNNFYPREAKVQWKVDNALQSGNSQESVTEQDSKDSTYSLSSTLTLSKADYEKHKVYACEVTHQGLSSPVTKSFNRGEC

SEQ ID NO: 371 - protein, 214 aa, synthetic construct
DIQMTQSPSFLSASVGDRVTITCKASQNVGINVVWHQQKPGKAPKALIYSSQHRYSGVPSRFSGSGSGTEFTLTISSLQPEDFATYFCQQFKSYPLTFGQGTKLEIKRTVAAPSVFIFPPSDEQLKSGTASVVCLLNNFYPREAKVQWKVDNALQSGNSQESVTEQDSKDSTYSLSSTLTLSKADYEKHKVYACEVTHQGLSSPVTKSFNRGEC

SEQ ID NO: 372 - protein, 214 aa, synthetic construct
DIQMTQSPSFLSASVGDRVTITCKASQNVGINVVWHQQKPGKAPKALIYSSTHRYSGVPSRFSGSGSGTEFTLTISSLQPEDFATYFCQQFKSYPLTFGQGTKLEIKRTVAAPSVFIFPPSDEQLKSGTASVVCLLNNFYPREAKVQWKVDNALQSGNSQESVTEQDSKDSTYSLSSTLTLSKADYEKHKVYACEVTHQGLSSPVTKSFNRGEC

SEQ ID NO: 373 - protein, 214 aa, synthetic construct
DIQMTQSPSFLSASVGDRVTITCKASQNVGINVVWHQQKPGKAPKALIYSSVHRYSGVPSRFSGSGSGTEFTLTISSLQPEDFATYFCQQFKSYPLTFGQGTKLEIKRTVAAPSVFIFPPSDEQLKSGTASVVCLLNNFYPREAKVQWKVDNALQSGNSQESVTEQDSKDSTYSLSSTLTLSKADYEKHKVYACEVTHQGLSSPVTKSFNRGEC

SEQ ID NO: 374 - protein, 214 aa, synthetic construct
DIQMTQSPSFLSASVGDRVTITCKASQNVGINVVWHQQKPGKAPKALIYSSWHRYSGVPSRFSGSGSGTEFTLTISSLQPEDFATYFCQQFKSYPLTFGQGTKLEIKRTVAAPSVFIFPPSDEQLKSGTASVVCLLNNFYPREAKVQWKVDNALQSGNSQESVTEQDSKDSTYSLSSTLTLSKADYEKHKVYACEVTHQGLSSPVTKSFNRGEC

SEQ ID NO: 375 - protein, 214 aa, synthetic construct
DIQMTQSPSFLSASVGDRVTITCKASQNVGINVVWHQQKPGKAPKALIYSSYHRYSGVPSRFSGSGSGTEFTLTISSLQPEDFATYFCQQFKSYPLTFGQGTKLEIKRTVAAPSVFIFPPSDEQLKSGTASVVCLLNNFYPREAKVQWKVDNALQSGNSQESVTEQDSKDSTYSLSSTLTLSKADYEKHKVYACEVTHQGLSSPVTKSFNRGEC

SEQ ID NO: 376 - protein, 214 aa, synthetic construct
DIQMTQSPSFLSASVGDRVTITCKASQNVGINVVWHQQKPGKAPKALIYSSSARYSGVPSRFSGSGSGTEFTLTISSLQPEDFATYFCQQFKSYPLTFGQGTKLEIKRTVAAPSVFIFPPSDEQLKSGTASVVCLLNNFYPREAKVQWKVDNALQSGNSQESVTEQDSKDSTYSLSSTLTLSKADYEKHKVYACEVTHQGLSSPVTKSFNRGEC

SEQ ID NO: 377 - protein, 214 aa, synthetic construct
DIQMTQSPSFLSASVGDRVTITCKASQNVGINVVWHQQKPGKAPKALIYSSSERYSGVPSRFSGSGSGTEFTLTISSLQPEDFATYFCQQFKSYPLTFGQGTKLEIKRTVAAPSVFIFPPSDEQLKSGTASVVCLLNNFYPREAKVQWKVDNALQSGNSQESVTEQDSKDSTYSLSSTLTLSKADYEKHKVYACEVTHQGLSSPVTKSFNRGEC

SEQ ID NO: 378 - protein, 214 aa, synthetic construct
DIQMTQSPSFLSASVGDRVTITCKASQNVGINVVWHQQKPGKAPKALIYSSSFRYSGVPSRFSGSGSGTEFTLTISSLQPEDFATYFCQQFKSYPLTFGQGTKLEIKRTVAAPSVFIFPPSDEQLKSGTASVVCLLNNFYPREAKVQWKVDNALQSGNSQESVTEQDSKDSTYSLSSTLTLSKADYEKHKVYACEVTHQGLSSPVTKSFNRGEC

SEQ ID NO: 379 - protein, 214 aa, synthetic construct
DIQMTQSPSFLSASVGDRVTITCKASQNVGINVVWHQQKPGKAPKALIYSSSGRYSGVPSRFSGSGSGTEFTLTISSLQPEDFATYFCQQFKSYPLTFGQGTKLEIKRTVAAPSVFIFPPSDEQLKSGTASVVCLLNNFYPREAKVQWKVDNALQSGNSQESVTEQDSKDSTYSLSSTLTLSKADYEKHKVYACEVTHQGLSSPVTKSFNRGEC

SEQ ID NO: 380 - protein, 214 aa, synthetic construct
DIQMTQSPSFLSASVGDRVTITCKASQNVGINVVWHQQKPGKAPKALIYSSSKRYSGVPSRFSGSGSGTEFTLTISSLQPEDFATYFCQQFKSYPLTFGQGTKLEIKRTVAAPSVFIFPPSDEQLKSGTASVVCLLNNFYPREAKVQWKVDNALQSGNSQESVTEQDSKDSTYSLSSTLTLSKADYEKHKVYACEVTHQGLSSPVTKSFNRGEC

SEQ ID NO: 381 - protein, 214 aa, synthetic construct
DIQMTQSPSFLSASVGDRVTITCKASQNVGINVVWHQQKPGKAPKALIYSSSLRYSGVPSRFSGSGSGTEFTLTISSLQPEDFATYFCQQFKSYPLTFGQGTKLEIKRTVAAPSVFIFPPSDEQLKSGTASVVCLLNNFYPREAKVQWKVDNALQSGNSQESVTEQDSKDSTYSLSSTLTLSKADYEKHKVYACEVTHQGLSSPVTKSFNRGEC

SEQ ID NO: 382 - protein, 214 aa, synthetic construct
DIQMTQSPSFLSASVGDRVTITCKASQNVGINVVWHQQKPGKAPKALIYSSSMRYSGVPSRFSGSGSGTEFTLTISSLQPEDFATYFCQQFKSYPLTFGQGTKLEIKRTVAAPSVFIFPPSDEQLKSGTASVVCLLNNFYPREAKVQWKVDNALQSGNSQESVTEQDSKDSTYSLSSTLTLSKADYEKHKVYACEVTHQGLSSPVTKSFNRGEC

SEQ ID NO: 383 - protein, 214 aa, synthetic construct
DIQMTQSPSFLSASVGDRVTITCKASQNVGINVVWHQQKPGKAPKALIYSSSNRYSGVPSRFSGSGSGTEFTLTISSLQPEDFATYFCQQFKSYPLTFGQGTKLEIKRTVAAPSVFIFPPSDEQLKSGTASVVCLLNNFYPREAKVQWKVDNALQSGNSQESVTEQDSKDSTYSLSSTLTLSKADYEKHKVYACEVTHQGLSSPVTKSFNRGEC

SEQ ID NO: 384 - protein, 214 aa, synthetic construct
DIQMTQSPSFLSASVGDRVTITCKASQNVGINVVWHQQKPGKAPKALIYSSSPRYSGVPSRFSGSGSGTEFTLTISSLQPEDFATYFCQQFKSYPLTFGQGTKLEIKRTVAAPSVFIFPPSDEQLKSGTASVVCLLNNFYPREAKVQWKVDNALQSGNSQESVTEQDSKDSTYSLSSTLTLSKADYEKHKVYACEVTHQGLSSPVTKSFNRGEC

SEQ ID NO: 385 - protein, 214 aa, synthetic construct
DIQMTQSPSFLSASVGDRVTITCKASQNVGINVVWHQQKPGKAPKALIYSSSQRYSGVPSRFSGSGSGTEFTLTISSLQPEDFATYFCQQFKSYPLTFGQGTKLEIKRTVAAPSVFIFPPSDEQLKSGTASVVCLLNNFYPREAKVQWKVDNALQSGNSQESVTEQDSKDSTYSLSSTLTLSKADYEKHKVYACEVTHQGLSSPVTKSFNRGEC

SEQ ID NO: 386 - protein, 214 aa, synthetic construct
DIQMTQSPSFLSASVGDRVTITCKASQNVGINVVWHQQKPGKAPKALIYSSSRRYSGVPSRFSGSGSGTEFTLTISSLQPEDFATYFCQQFKSYPLTFGQGTKLEIKRTVAAPSVFIFPPSDEQLKSGTASVVCLLNNFYPREAKVQWKVDNALQSGNSQESVTEQDSKDSTYSLSSTLTLSKADYEKHKVYACEVTHQGLSSPVTKSFNRGEC

SEQ ID NO: 387 - protein, 214 aa, synthetic construct
DIQMTQSPSFLSASVGDRVTITCKASQNVGINVVWHQQKPGKAPKALIYSSSVRYSGVPSRFSGSGSGTEFTLTISSLQPEDFATYFCQQFKSYPLTFGQGTKLEIKRTVAAPSVFIFPPSDEQLKSGTASVVCLLNNFYPREAKVQWKVDNALQSGNSQESVTEQDSKDSTYSLSSTLTLSKADYEKHKVYACEVTHQGLSSPVTKSFNRGEC

SEQ ID NO: 388 - protein, 214 aa, synthetic construct
DIQMTQSPSFLSASVGDRVTITCKASQNVGINVVWHQQKPGKAPKALIYSSSWRYSGVPSRFSGSGSGTEFTLTISSLQPEDFATYFCQQFKSYPLTFGQGTKLEIKRTVAAPSVFIFPPSDEQLKSGTASVVCLLNNFYPREAKVQWKVDNALQSGNSQESVTEQDSKDSTYSLSSTLTLSKADYEKHKVYACEVTHQGLSSPVTKSFNRGEC

SEQ ID NO: 389 - protein, 214 aa, synthetic construct
DIQMTQSPSFLSASVGDRVTITCKASQNVGINVVWHQQKPGKAPKALIYSSSYRYSGVPSRFSGSGSGTEFTLTISSLQPEDFATYFCQQFKSYPLTFGQGTKLEIKRTVAAPSVFIFPPSDEQLKSGTASVVCLLNNFYPREAKVQWKVDNALQSGNSQESVTEQDSKDSTYSLSSTLTLSKADYEKHKVYACEVTHQGLSSPVTKSFNRGEC

SEQ ID NO: 390 - protein, 214 aa, synthetic construct
DIQMTQSPSFLSASVGDRVTITCKASQNVGINVVWHQQKPGKAPKALIYSSSHAYSGVPSRFSGSGSGTEFTLTISSLQPEDFATYFCQQFKSYPLTFGQGTKLEIKRTVAAPSVFIFPPSDEQLKSGTASVVCLLNNFYPREAKVQWKVDNALQSGNSQESVTEQDSKDSTYSLSSTLTLSKADYEKHKVYACEVTHQGLSSPVTKSFNRGEC

SEQ ID NO: 391 - protein, 214 aa, synthetic construct
DIQMTQSPSFLSASVGDRVTITCKASQNVGINVVWHQQKPGKAPKALIYSSSHDYSGVPSRFSGSGSGTEFTLTISSLQPEDFATYFCQQFKSYPLTFGQGTKLEIKRTVAAPSVFIFPPSDEQLKSGTASVVCLLNNFYPREAKVQWKVDNALQSGNSQESVTEQDSKDSTYSLSSTLTLSKADYEKHKVYACEVTHQGLSSPVTKSFNRGEC

SEQ ID NO: 392 - protein, 214 aa, synthetic construct
DIQMTQSPSFLSASVGDRVTITCKASQNVGINVVWHQQKPGKAPKALIYSSSHFYSGVPSRFSGSGSGTEFTLTISSLQPEDFATYFCQQFKSYPLTFGQGTKLEIKRTVAAPSVFIFPPSDEQLKSGTASVVCLLNNFYPREAKVQWKVDNALQSGNSQESVTEQDSKDSTYSLSSTLTLSKADYEKHKVYACEVTHQGLSSPVTKSFNRGEC

SEQ ID NO: 393 - protein, 214 aa, synthetic construct
DIQMTQSPSFLSASVGDRVTITCKASQNVGINVVWHQQKPGKAPKALIYSSSHHYSGVPSRFSGSGSGTEFTLTISSLQPEDFATYFCQQFKSYPLTFGQGTKLEIKRTVAAPSVFIFPPSDEQLKSGTASVVCLLNNFYPREAKVQWKVDNALQSGNSQESVTEQDSKDSTYSLSSTLTLSKADYEKHKVYACEVTHQGLSSPVTKSFNRGEC

SEQ ID NO: 394 - protein, 214 aa, synthetic construct
DIQMTQSPSFLSASVGDRVTITCKASQNVGINVVWHQQKPGKAPKALIYSSSHIYSGVPSRFSGSGSGTEFTLTISSLQPEDFATYFCQQFKSYPLTFGQGTKLEIKRTVAAPSVFIFPPSDEQLKSGTASVVCLLNNFYPREAKVQWKVDNALQSGNSQESVTEQDSKDSTYSLSSTLTLSKADYEKHKVYACEVTHQGLSSPVTKSFNRGEC

SEQ ID NO: 395 - protein, 214 aa, synthetic construct
DIQMTQSPSFLSASVGDRVTITCKASQNVGINVVWHQQKPGKAPKALIYSSSHKYSGVPSRFSGSGSGTEFTLTISSLQPEDFATYFCQQFKSYPLTFGQGTKLEIKRTVAAPSVFIFPPSDEQLKSGTASVVCLLNNFYPREAKVQWKVDNALQSGNSQESVTEQDSKDSTYSLSSTLTLSKADYEKHKVYACEVTHQGLSSPVTKSFNRGEC

SEQ ID NO: 396 - protein, 214 aa, synthetic construct
DIQMTQSPSFLSASVGDRVTITCKASQNVGINVVWHQQKPGKAPKALIYSSSHLYSGVPSRFSGSGSGTEFTLTISSLQPEDFATYFCQQFKSYPLTFGQGTKLEIKRTVAAPSVFIFPPSDEQLKSGTASVVCLLNNFYPREAKVQWKVDNALQSGNSQESVTEQDSKDSTYSLSSTLTLSKADYEKHKVYACEVTHQGLSSPVTKSFNRGEC

SEQ ID NO: 397 - protein, 214 aa, synthetic construct
DIQMTQSPSFLSASVGDRVTITCKASQNVGINVVWHQQKPGKAPKALIYSSSHMYSGVPSRFSGSGSGTEFTLTISSLQPEDFATYFCQQFKSYPLTFGQGTKLEIKRTVAAPSVFIFPPSDEQLKSGTASVVCLLNNFYPREAKVQWKVDNALQSGNSQESVTEQDSKDSTYSLSSTLTLSKADYEKHKVYACEVTHQGLSSPVTKSFNRGEC

SEQ ID NO: 398 - protein, 214 aa, synthetic construct
DIQMTQSPSFLSASVGDRVTITCKASQNVGINVVWHQQKPGKAPKALIYSSSHNYSGVPSRFSGSGSGTEFTLTISSLQPEDFATYFCQQFKSYPLTFGQGTKLEIKRTVAAPSVFIFPPSDEQLKSGTASVVCLLNNFYPREAKVQWKVDNALQSGNSQESVTEQDSKDSTYSLSSTLTLSKADYEKHKVYACEVTHQGLSSPVTKSFNRGEC

SEQ ID NO: 399 - protein, 214 aa, synthetic construct
DIQMTQSPSFLSASVGDRVTITCKASQNVGINVVWHQQKPGKAPKALIYSSSHPYSGVPSRFSGSGSGTEFTLTISSLQPEDFATYFCQQFKSYPLTFGQGTKLEIKRTVAAPSVFIFPPSDEQLKSGTASVVCLLNNFYPREAKVQWKVDNALQSGNSQESVTEQDSKDSTYSLSSTLTLSKADYEKHKVYACEVTHQGLSSPVTKSFNRGEC

SEQ ID NO: 400 - protein, 214 aa, synthetic construct
DIQMTQSPSFLSASVGDRVTITCKASQNVGINVVWHQQKPGKAPKALIYSSSHQYSGVPSRFSGSGSGTEFTLTISSLQPEDFATYFCQQFKSYPLTFGQGTKLEIKRTVAAPSVFIFPPSDEQLKSGTASVVCLLNNFYPREAKVQWKVDNALQSGNSQESVTEQDSKDSTYSLSSTLTLSKADYEKHKVYACEVTHQGLSSPVTKSFNRGEC

SEQ ID NO: 401 - protein, 214 aa, synthetic construct
DIQMTQSPSFLSASVGDRVTITCKASQNVGINVVWHQQKPGKAPKALIYSSSHTYSGVPSRFSGSGSGTEFTLTISSLQPEDFATYFCQQFKSYPLTFGQGTKLEIKRTVAAPSVFIFPPSDEQLKSGTASVVCLLNNFYPREAKVQWKVDNALQSGNSQESVTEQDSKDSTYSLSSTLTLSKADYEKHKVYACEVTHQGLSSPVTKSFNRGEC

SEQ ID NO: 402 - protein, 214 aa, synthetic construct
DIQMTQSPSFLSASVGDRVTITCKASQNVGINVVWHQQKPGKAPKALIYSSSHVYSGVPSRFSGSGSGTEFTLTISSLQPEDFATYFCQQFKSYPLTFGQGTKLEIKRTVAAPSVFIFPPSDEQLKSGTASVVCLLNNFYPREAKVQWKVDNALQSGNSQESVTEQDSKDSTYSLSSTLTLSKADYEKHKVYACEVTHQGLSSPVTKSFNRGEC

SEQ ID NO: 403 - protein, 214 aa, synthetic construct
DIQMTQSPSFLSASVGDRVTITCKASQNVGINVVWHQQKPGKAPKALIYSSSHWYSGVPSRFSGSGSGTEFTLTISSLQPEDFATYFCQQFKSYPLTFGQGTKLEIKRTVAAPSVFIFPPSDEQLKSGTASVVCLLNNFYPREAKVQWKVDNALQSGNSQESVTEQDSKDSTYSLSSTLTLSKADYEKHKVYACEVTHQGLSSPVTKSFNRGEC

SEQ ID NO: 404 - protein, 214 aa, synthetic construct
DIQMTQSPSFLSASVGDRVTITCKASQNVGINVVWHQQKPGKAPKALIYSSSHRASGVPSRFSGSGSGTEFTLTISSLQPEDFATYFCQQFKSYPLTFGQGTKLEIKRTVAAPSVFIFPPSDEQLKSGTASVVCLLNNFYPREAKVQWKVDNALQSGNSQESVTEQDSKDSTYSLSSTLTLSKADYEKHKVYACEVTHQGLSSPVTKSFNRGEC

SEQ ID NO: 405 - protein, 214 aa, synthetic construct
DIQMTQSPSFLSASVGDRVTITCKASQNVGINVVWHQQKPGKAPKALIYSSSHRDSGVPSRFSGSGSGTEFTLTISSLQPEDFATYFCQQFKSYPLTFGQGTKLEIKRTVAAPSVFIFPPSDEQLKSGTASVVCLLNNFYPREAKVQWKVDNALQSGNSQESVTEQDSKDSTYSLSSTLTLSKADYEKHKVYACEVTHQGLSSPVTKSFNRGEC

SEQ ID NO: 406 - protein, 214 aa, synthetic construct
DIQMTQSPSFLSASVGDRVTITCKASQNVGINVVWHQQKPGKAPKALIYSSSHRESGVPSRFSGSGSGTEFTLTISSLQPEDFATYFCQQFKSYPLTFGQGTKLEIKRTVAAPSVFIFPPSDEQLKSGTASVVCLLNNFYPREAKVQWKVDNALQSGNSQESVTEQDSKDSTYSLSSTLTLSKADYEKHKVYACEVTHQGLSSPVTKSFNRGEC

SEQ ID NO: 407 - protein, 214 aa, synthetic construct
DIQMTQSPSFLSASVGDRVTITCKASQNVGINVVWHQQKPGKAPKALIYSSSHRFSGVPSRFSGSGSGTEFTLTISSLQPEDFATYFCQQFKSYPLTFGQGTKLEIKRTVAAPSVFIFPPSDEQLKSGTASVVCLLNNFYPREAKVQWKVDNALQSGNSQESVTEQDSKDSTYSLSSTLTLSKADYEKHKVYACEVTHQGLSSPVTKSFNRGEC

SEQ ID NO: 408 - protein, 214 aa, synthetic construct
DIQMTQSPSFLSASVGDRVTITCKASQNVGINVVWHQQKPGKAPKALIYSSSHRGSGVPSRFSGSGSGTEFTLTISSLQPEDFATYFCQQFKSYPLTFGQGTKLEIKRTVAAPSVFIFPPSDEQLKSGTASVVCLLNNFYPREAKVQWKVDNALQSGNSQESVTEQDSKDSTYSLSSTLTLSKADYEKHKVYACEVTHQGLSSPVTKSFNRGEC

SEQ ID NO: 409 - protein, 214 aa, synthetic construct
DIQMTQSPSFLSASVGDRVTITCKASQNVGINVVWHQQKPGKAPKALIYSSSHRHSGVPSRFSGSGSGTEFTLTISSLQPEDFATYFCQQFKSYPLTFGQGTKLEIKRTVAAPSVFIFPPSDEQLKSGTASVVCLLNNFYPREAKVQWKVDNALQSGNSQESVTEQDSKDSTYSLSSTLTLSKADYEKHKVYACEVTHQGLSSPVTKSFNRGEC

SEQ ID NO: 410 - protein, 214 aa, synthetic construct
DIQMTQSPSFLSASVGDRVTITCKASQNVGINVVWHQQKPGKAPKALIYSSSHRMSGVPSRFSGSGSGTEFTLTISSLQPEDFATYFCQQFKSYPLTFGQGTKLEIKRTVAAPSVFIFPPSDEQLKSGTASVVCLLNNFYPREAKVQWKVDNALQSGNSQESVTEQDSKDSTYSLSSTLTLSKADYEKHKVYACEVTHQGLSSPVTKSFNRGEC

SEQ ID NO: 411 - protein, 214 aa, synthetic construct
DIQMTQSPSFLSASVGDRVTITCKASQNVGINVVWHQQKPGKAPKALIYSSSHRNSGVPSRFSGSGSGTEFTLTISSLQPEDFATYFCQQFKSYPLTFGQGTKLEIKRTVAAPSVFIFPPSDEQLKSGTASVVCLLNNFYPREAKVQWKVDNALQSGNSQESVTEQDSKDSTYSLSSTLTLSKADYEKHKVYACEVTHQGLSSPVTKSFNRGEC

SEQ ID NO: 412 - protein, 214 aa, synthetic construct
DIQMTQSPSFLSASVGDRVTITCKASQNVGINVVWHQQKPGKAPKALIYSSSHRPSGVPSRFSGSGSGTEFTLTISSLQPEDFATYFCQQFKSYPLTFGQGTKLEIKRTVAAPSVFIFPPSDEQLKSGTASVVCLLNNFYPREAKVQWKVDNALQSGNSQESVTEQDSKDSTYSLSSTLTLSKADYEKHKVYACEVTHQGLSSPVTKSFNRGEC

SEQ ID NO: 413 - protein, 214 aa, synthetic construct
DIQMTQSPSFLSASVGDRVTITCKASQNVGINVVWHQQKPGKAPKALIYSSSHRQSGVPSRFSGSGSGTEFTLTISSLQPEDFATYFCQQFKSYPLTFGQGTKLEIKRTVAAPSVFIFPPSDEQLKSGTASVVCLLNNFYPREAKVQWKVDNALQSGNSQESVTEQDSKDSTYSLSSTLTLSKADYEKHKVYACEVTHQGLSSPVTKSFNRGEC

SEQ ID NO: 414 - protein, 214 aa, synthetic construct
DIQMTQSPSFLSASVGDRVTITCKASQNVGINVVWHQQKPGKAPKALIYSSSHRRSGVPSRFSGSGSGTEFTLTISSLQPEDFATYFCQQFKSYPLTFGQGTKLEIKRTVAAPSVFIFPPSDEQLKSGTASVVCLLNNFYPREAKVQWKVDNALQSGNSQESVTEQDSKDSTYSLSSTLTLSKADYEKHKVYACEVTHQGLSSPVTKSFNRGEC

SEQ ID NO: 415 - protein, 214 aa, synthetic construct
DIQMTQSPSFLSASVGDRVTITCKASQNVGINVVWHQQKPGKAPKALIYSSSHRSSGVPSRFSGSGSGTEFTLTISSLQPEDFATYFCQQFKSYPLTFGQGTKLEIKRTVAAPSVFIFPPSDEQLKSGTASVVCLLNNFYPREAKVQWKVDNALQSGNSQESVTEQDSKDSTYSLSSTLTLSKADYEKHKVYACEVTHQGLSSPVTKSFNRGEC

SEQ ID NO: 416 - protein, 214 aa, synthetic construct
DIQMTQSPSFLSASVGDRVTITCKASQNVGINVVWHQQKPGKAPKALIYSSSHRTSGVPSRFSGSGSGTEFTLTISSLQPEDFATYFCQQFKSYPLTFGQGTKLEIKRTVAAPSVFIFPPSDEQLKSGTASVVCLLNNFYPREAKVQWKVDNALQSGNSQESVTEQDSKDSTYSLSSTLTLSKADYEKHKVYACEVTHQGLSSPVTKSFNRGEC

SEQ ID NO: 417 - protein, 214 aa, synthetic construct
DIQMTQSPSFLSASVGDRVTITCKASQNVGINVVWHQQKPGKAPKALIYSSSHRVSGVPSRFSGSGSGTEFTLTISSLQPEDFATYFCQQFKSYPLTFGQGTKLEIKRTVAAPSVFIFPPSDEQLKSGTASVVCLLNNFYPREAKVQWKVDNALQSGNSQESVTEQDSKDSTYSLSSTLTLSKADYEKHKVYACEVTHQGLSSPVTKSFNRGEC

SEQ ID NO: 418 - protein, 214 aa, synthetic construct
DIQMTQSPSFLSASVGDRVTITCKASQNVGINVVWHQQKPGKAPKALIYSSSHRWSGVPSRFSGSGSGTEFTLTISSLQPEDFATYFCQQFKSYPLTFGQGTKLEIKRTVAAPSVFIFPPSDEQLKSGTASVVCLLNNFYPREAKVQWKVDNALQSGNSQESVTEQDSKDSTYSLSSTLTLSKADYEKHKVYACEVTHQGLSSPVTKSFNRGEC

SEQ ID NO: 419 - protein, 214 aa, synthetic construct
DIQMTQSPSFLSASVGDRVTITCKASQNVGINVVWHQQKPGKAPKALIYSSSHRYCGVPSRFSGSGSGTEFTLTISSLQPEDFATYFCQQFKSYPLTFGQGTKLEIKRTVAAPSVFIFPPSDEQLKSGTASVVCLLNNFYPREAKVQWKVDNALQSGNSQESVTEQDSKDSTYSLSSTLTLSKADYEKHKVYACEVTHQGLSSPVTKSFNRGEC

SEQ ID NO: 420 - protein, 214 aa, synthetic construct
DIQMTQSPSFLSASVGDRVTITCKASQNVGINVVWHQQKPGKAPKALIYSSSHRYDGVPSRFSGSGSGTEFTLTISSLQPEDFATYFCQQFKSYPLTFGQGTKLEIKRTVAAPSVFIFPPSDEQLKSGTASVVCLLNNFYPREAKVQWKVDNALQSGNSQESVTEQDSKDSTYSLSSTLTLSKADYEKHKVYACEVTHQGLSSPVTKSFNRGEC

SEQ ID NO: 421 - protein, 214 aa, synthetic construct
DIQMTQSPSFLSASVGDRVTITCKASQNVGINVVWHQQKPGKAPKALIYSSSHRYFGVPSRFSGSGSGTEFTLTISSLQPEDFATYFCQQFKSYPLTFGQGTKLEIKRTVAAPSVFIFPPSDEQLKSGTASVVCLLNNFYPREAKVQWKVDNALQSGNSQESVTEQDSKDSTYSLSSTLTLSKADYEKHKVYACEVTHQGLSSPVTKSFNRGEC

SEQ ID NO: 422 - protein, 214 aa, synthetic construct
DIQMTQSPSFLSASVGDRVTITCKASQNVGINVVWHQQKPGKAPKALIYSSSHRYGGVPSRFSGSGSGTEFTLTISSLQPEDFATYFCQQFKSYPLTFGQGTKLEIKRTVAAPSVFIFPPSDEQLKSGTASVVCLLNNFYPREAKVQWKVDNALQSGNSQESVTEQDSKDSTYSLSSTLTLSKADYEKHKVYACEVTHQGLSSPVTKSFNRGEC

SEQ ID NO: 423 - protein, 214 aa, synthetic construct
DIQMTQSPSFLSASVGDRVTITCKASQNVGINVVWHQQKPGKAPKALIYSSSHRYHGVPSRFSGSGSGTEFTLTISSLQPEDFATYFCQQFKSYPLTFGQGTKLEIKRTVAAPSVFIFPPSDEQLKSGTASVVCLLNNFYPREAKVQWKVDNALQSGNSQESVTEQDSKDSTYSLSSTLTLSKADYEKHKVYACEVTHQGLSSPVTKSFNRGEC

SEQ ID NO: 424 - protein, 214 aa, synthetic construct
DIQMTQSPSFLSASVGDRVTITCKASQNVGINVVWHQQKPGKAPKALIYSSSHRYIGVPSRFSGSGSGTEFTLTISSLQPEDFATYFCQQFKSYPLTFGQGTKLEIKRTVAAPSVFIFPPSDEQLKSGTASVVCLLNNFYPREAKVQWKVDNALQSGNSQESVTEQDSKDSTYSLSSTLTLSKADYEKHKVYACEVTHQGLSSPVTKSFNRGEC

SEQ ID NO: 425 - protein, 214 aa, synthetic construct
DIQMTQSPSFLSASVGDRVTITCKASQNVGINVVWHQQKPGKAPKALIYSSSHRYKGVPSRFSGSGSGTEFTLTISSLQPEDFATYFCQQFKSYPLTFGQGTKLEIKRTVAAPSVFIFPPSDEQLKSGTASVVCLLNNFYPREAKVQWKVDNALQSGNSQESVTEQDSKDSTYSLSSTLTLSKADYEKHKVYACEVTHQGLSSPVTKSFNRGEC

SEQ ID NO: 426 - protein, 214 aa, synthetic construct
DIQMTQSPSFLSASVGDRVTITCKASQNVGINVVWHQQKPGKAPKALIYSSSHRYNGVPSRFSGSGSGTEFTLTISSLQPEDFATYFCQQFKSYPLTFGQGTKLEIKRTVAAPSVFIFPPSDEQLKSGTASVVCLLNNFYPREAKVQWKVDNALQSGNSQESVTEQDSKDSTYSLSSTLTLSKADYEKHKVYACEVTHQGLSSPVTKSFNRGEC

SEQ ID NO: 427 - protein, 214 aa, synthetic construct
DIQMTQSPSFLSASVGDRVTITCKASQNVGINVVWHQQKPGKAPKALIYSSSHRYPGVPSRFSGSGSGTEFTLTISSLQPEDFATYFCQQFKSYPLTFGQGTKLEIKRTVAAPSVFIFPPSDEQLKSGTASVVCLLNNFYPREAKVQWKVDNALQSGNSQESVTEQDSKDSTYSLSSTLTLSKADYEKHKVYACEVTHQGLSSPVTKSFNRGEC

SEQ ID NO: 428 - protein, 214 aa, synthetic construct
DIQMTQSPSFLSASVGDRVTITCKASQNVGINVVWHQQKPGKAPKALIYSSSHRYQGVPSRFSGSGSGTEFTLTISSLQPEDFATYFCQQFKSYPLTFGQGTKLEIKRTVAAPSVFIFPPSDEQLKSGTASVVCLLNNFYPREAKVQWKVDNALQSGNSQESVTEQDSKDSTYSLSSTLTLSKADYEKHKVYACEVTHQGLSSPVTKSFNRGEC

SEQ ID NO: 429 - protein, 214 aa, synthetic construct
DIQMTQSPSFLSASVGDRVTITCKASQNVGINVVWHQQKPGKAPKALIYSSSHRYRGVPSRFSGSGSGTEFTLTISSLQPEDFATYFCQQFKSYPLTFGQGTKLEIKRTVAAPSVFIFPPSDEQLKSGTASVVCLLNNFYPREAKVQWKVDNALQSGNSQESVTEQDSKDSTYSLSSTLTLSKADYEKHKVYACEVTHQGLSSPVTKSFNRGEC

SEQ ID NO: 430 - protein, 214 aa, synthetic construct
DIQMTQSPSFLSASVGDRVTITCKASQNVGINVVWHQQKPGKAPKALIYSSSHRYTGVPSRFSGSGSGTEFTLTISSLQPEDFATYFCQQFKSYPLTFGQGTKLEIKRTVAAPSVFIFPPSDEQLKSGTASVVCLLNNFYPREAKVQWKVDNALQSGNSQESVTEQDSKDSTYSLSSTLTLSKADYEKHKVYACEVTHQGLSSPVTKSFNRGEC

SEQ ID NO: 431 - protein, 214 aa, synthetic construct
DIQMTQSPSFLSASVGDRVTITCKASQNVGINVVWHQQKPGKAPKALIYSSSHRYVGVPSRFSGSGSGTEFTLTISSLQPEDFATYFCQQFKSYPLTFGQGTKLEIKRTVAAPSVFIFPPSDEQLKSGTASVVCLLNNFYPREAKVQWKVDNALQSGNSQESVTEQDSKDSTYSLSSTLTLSKADYEKHKVYACEVTHQGLSSPVTKSFNRGEC

SEQ ID NO: 432 - protein, 214 aa, synthetic construct
DIQMTQSPSFLSASVGDRVTITCKASQNVGINVVWHQQKPGKAPKALIYSSSHRYWGVPSRFSGSGSGTEFTLTISSLQPEDFATYFCQQFKSYPLTFGQGTKLEIKRTVAAPSVFIFPPSDEQLKSGTASVVCLLNNFYPREAKVQWKVDNALQSGNSQESVTEQDSKDSTYSLSSTLTLSKADYEKHKVYACEVTHQGLSSPVTKSFNRGEC

SEQ ID NO: 433 - protein, 214 aa, synthetic construct
DIQMTQSPSFLSASVGDRVTITCKASQNVGINVVWHQQKPGKAPKALIYSSSHRYYGVPSRFSGSGSGTEFTLTISSLQPEDFATYFCQQFKSYPLTFGQGTKLEIKRTVAAPSVFIFPPSDEQLKSGTASVVCLLNNFYPREAKVQWKVDNALQSGNSQESVTEQDSKDSTYSLSSTLTLSKADYEKHKVYACEVTHQGLSSPVTKSFNRGEC

SEQ ID NO: 434 - protein, 214 aa, synthetic construct
DIQMTQSPSFLSASVGDRVTITCKASQNVGINVVWHQQKPGKAPKALIYSSSHRYSGVPSRFSGSGSGTEFTLTISSLQPEDFATYFCAQFKSYPLTFGQGTKLEIKRTVAAPSVFIFPPSDEQLKSGTASVVCLLNNFYPREAKVQWKVDNALQSGNSQESVTEQDSKDSTYSLSSTLTLSKADYEKHKVYACEVTHQGLSSPVTKSFNRGEC

SEQ ID NO: 435 - protein, 214 aa, synthetic construct
DIQMTQSPSFLSASVGDRVTITCKASQNVGINVVWHQQKPGKAPKALIYSSSHRYSGVPSRFSGSGSGTEFTLTISSLQPEDFATYFCEQFKSYPLTFGQGTKLEIKRTVAAPSVFIFPPSDEQLKSGTASVVCLLNNFYPREAKVQWKVDNALQSGNSQESVTEQDSKDSTYSLSSTLTLSKADYEKHKVYACEVTHQGLSSPVTKSFNRGEC

SEQ ID NO: 436 - protein, 214 aa, synthetic construct
DIQMTQSPSFLSASVGDRVTITCKASQNVGINVVWHQQKPGKAPKALIYSSSHRYSGVPSRFSGSGSGTEFTLTISSLQPEDFATYFCGQFKSYPLTFGQGTKLEIKRTVAAPSVFIFPPSDEQLKSGTASVVCLLNNFYPREAKVQWKVDNALQSGNSQESVTEQDSKDSTYSLSSTLTLSKADYEKHKVYACEVTHQGLSSPVTKSFNRGEC

SEQ ID NO: 437 - protein, 214 aa, synthetic construct
DIQMTQSPSFLSASVGDRVTITCKASQNVGINVVWHQQKPGKAPKALIYSSSHRYSGVPSRFSGSGSGTEFTLTISSLQPEDFATYFCHQFKSYPLTFGQGTKLEIKRTVAAPSVFIFPPSDEQLKSGTASVVCLLNNFYPREAKVQWKVDNALQSGNSQESVTEQDSKDSTYSLSSTLTLSKADYEKHKVYACEVTHQGLSSPVTKSFNRGEC

SEQ ID NO: 438 - protein, 214 aa, synthetic construct
DIQMTQSPSFLSASVGDRVTITCKASQNVGINVVWHQQKPGKAPKALIYSSSHRYSGVPSRFSGSGSGTEFTLTISSLQPEDFATYFCIQFKSYPLTFGQGTKLEIKRTVAAPSVFIFPPSDEQLKSGTASVVCLLNNFYPREAKVQWKVDNALQSGNSQESVTEQDSKDSTYSLSSTLTLSKADYEKHKVYACEVTHQGLSSPVTKSFNRGEC

SEQ ID NO: 439 - protein, 214 aa, synthetic construct
DIQMTQSPSFLSASVGDRVTITCKASQNVGINVVWHQQKPGKAPKALIYSSSHRYSGVPSRFSGSGSGTEFTLTISSLQPEDFATYFCKQFKSYPLTFGQGTKLEIKRTVAAPSVFIFPPSDEQLKSGTASVVCLLNNFYPREAKVQWKVDNALQSGNSQESVTEQDSKDSTYSLSSTLTLSKADYEKHKVYACEVTHQGLSSPVTKSFNRGEC

SEQ ID NO: 440 - protein, 214 aa, synthetic construct
DIQMTQSPSFLSASVGDRVTITCKASQNVGINVVWHQQKPGKAPKALIYSSSHRYSGVPSRFSGSGSGTEFTLTISSLQPEDFATYFCLQFKSYPLTFGQGTKLEIKRTVAAPSVFIFPPSDEQLKSGTASVVCLLNNFYPREAKVQWKVDNALQSGNSQESVTEQDSKDSTYSLSSTLTLSKADYEKHKVYACEVTHQGLSSPVTKSFNRGEC

SEQ ID NO: 441 - protein, 214 aa, synthetic construct
DIQMTQSPSFLSASVGDRVTITCKASQNVGINVVWHQQKPGKAPKALIYSSSHRYSGVPSRFSGSGSGTEFTLTISSLQPEDFATYFCNQFKSYPLTFGQGTKLEIKRTVAAPSVFIFPPSDEQLKSGTASVVCLLNNFYPREAKVQWKVDNALQSGNSQESVTEQDSKDSTYSLSSTLTLSKADYEKHKVYACEVTHQGLSSPVTKSFNRGEC

SEQ ID NO: 442 - protein, 214 aa, synthetic construct
DIQMTQSPSFLSASVGDRVTITCKASQNVGINVVWHQQKPGKAPKALIYSSSHRYSGVPSRFSGSGSGTEFTLTISSLQPEDFATYFCRQFKSYPLTFGQGTKLEIKRTVAAPSVFIFPPSDEQLKSGTASVVCLLNNFYPREAKVQWKVDNALQSGNSQESVTEQDSKDSTYSLSSTLTLSKADYEKHKVYACEVTHQGLSSPVTKSFNRGEC

SEQ ID NO: 443 - protein, 214 aa, synthetic construct
DIQMTQSPSFLSASVGDRVTITCKASQNVGINVVWHQQKPGKAPKALIYSSSHRYSGVPSRFSGSGSGTEFTLTISSLQPEDFATYFCSQFKSYPLTFGQGTKLEIKRTVAAPSVFIFPPSDEQLKSGTASVVCLLNNFYPREAKVQWKVDNALQSGNSQESVTEQDSKDSTYSLSSTLTLSKADYEKHKVYACEVTHQGLSSPVTKSFNRGEC

SEQ ID NO: 444 - protein, 214 aa, synthetic construct
DIQMTQSPSFLSASVGDRVTITCKASQNVGINVVWHQQKPGKAPKALIYSSSHRYSGVPSRFSGSGSGTEFTLTISSLQPEDFATYFCVQFKSYPLTFGQGTKLEIKRTVAAPSVFIFPPSDEQLKSGTASVVCLLNNFYPREAKVQWKVDNALQSGNSQESVTEQDSKDSTYSLSSTLTLSKADYEKHKVYACEVTHQGLSSPVTKSFNRGEC

SEQ ID NO: 445 - protein, 214 aa, synthetic construct
DIQMTQSPSFLSASVGDRVTITCKASQNVGINVVWHQQKPGKAPKALIYSSSHRYSGVPSRFSGSGSGTEFTLTISSLQPEDFATYFCWQFKSYPLTFGQGTKLEIKRTVAAPSVFIFPPSDEQLKSGTASVVCLLNNFYPREAKVQWKVDNALQSGNSQESVTEQDSKDSTYSLSSTLTLSKADYEKHKVYACEVTHQGLSSPVTKSFNRGEC

SEQ ID NO: 446 - protein, 214 aa, synthetic construct
DIQMTQSPSFLSASVGDRVTITCKASQNVGINVVWHQQKPGKAPKALIYSSSHRYSGVPSRFSGSGSGTEFTLTISSLQPEDFATYFCYQFKSYPLTFGQGTKLEIKRTVAAPSVFIFPPSDEQLKSGTASVVCLLNNFYPREAKVQWKVDNALQSGNSQESVTEQDSKDSTYSLSSTLTLSKADYEKHKVYACEVTHQGLSSPVTKSFNRGEC

SEQ ID NO: 447 - protein, 214 aa, synthetic construct
DIQMTQSPSFLSASVGDRVTITCKASQNVGINVVWHQQKPGKAPKALIYSSSHRYSGVPSRFSGSGSGTEFTLTISSLQPEDFATYFCQDFKSYPLTFGQGTKLEIKRTVAAPSVFIFPPSDEQLKSGTASVVCLLNNFYPREAKVQWKVDNALQSGNSQESVTEQDSKDSTYSLSSTLTLSKADYEKHKVYACEVTHQGLSSPVTKSFNRGEC

SEQ ID NO: 448 - protein, 214 aa, synthetic construct
DIQMTQSPSFLSASVGDRVTITCKASQNVGINVVWHQQKPGKAPKALIYSSSHRYSGVPSRFSGSGSGTEFTLTISSLQPEDFATYFCQEFKSYPLTFGQGTKLEIKRTVAAPSVFIFPPSDEQLKSGTASVVCLLNNFYPREAKVQWKVDNALQSGNSQESVTEQDSKDSTYSLSSTLTLSKADYEKHKVYACEVTHQGLSSPVTKSFNRGEC

SEQ ID NO: 449 - protein, 214 aa, synthetic construct
DIQMTQSPSFLSASVGDRVTITCKASQNVGINVVWHQQKPGKAPKALIYSSSHRYSGVPSRFSGSGSGTEFTLTISSLQPEDFATYFCQGFKSYPLTFGQGTKLEIKRTVAAPSVFIFPPSDEQLKSGTASVVCLLNNFYPREAKVQWKVDNALQSGNSQESVTEQDSKDSTYSLSSTLTLSKADYEKHKVYACEVTHQGLSSPVTKSFNRGEC

SEQ ID NO: 450 - protein, 214 aa, synthetic construct
DIQMTQSPSFLSASVGDRVTITCKASQNVGINVVWHQQKPGKAPKALIYSSSHRYSGVPSRFSGSGSGTEFTLTISSLQPEDFATYFCQHFKSYPLTFGQGTKLEIKRTVAAPSVFIFPPSDEQLKSGTASVVCLLNNFYPREAKVQWKVDNALQSGNSQESVTEQDSKDSTYSLSSTLTLSKADYEKHKVYACEVTHQGLSSPVTKSFNRGEC

SEQ ID NO: 451 - protein, 214 aa, synthetic construct
DIQMTQSPSFLSASVGDRVTITCKASQNVGINVVWHQQKPGKAPKALIYSSSHRYSGVPSRFSGSGSGTEFTLTISSLQPEDFATYFCQIFKSYPLTFGQGTKLEIKRTVAAPSVFIFPPSDEQLKSGTASVVCLLNNFYPREAKVQWKVDNALQSGNSQESVTEQDSKDSTYSLSSTLTLSKADYEKHKVYACEVTHQGLSSPVTKSFNRGEC

SEQ ID NO: 452 - protein, 214 aa, synthetic construct
DIQMTQSPSFLSASVGDRVTITCKASQNVGINVVWHQQKPGKAPKALIYSSSHRYSGVPSRFSGSGSGTEFTLTISSLQPEDFATYFCQKFKSYPLTFGQGTKLEIKRTVAAPSVFIFPPSDEQLKSGTASVVCLLNNFYPREAKVQWKVDNALQSGNSQESVTEQDSKDSTYSLSSTLTLSKADYEKHKVYACEVTHQGLSSPVTKSFNRGEC

SEQ ID NO: 453 - protein, 214 aa, synthetic construct
DIQMTQSPSFLSASVGDRVTITCKASQNVGINVVWHQQKPGKAPKALIYSSSHRYSGVPSRFSGSGSGTEFTLTISSLQPEDFATYFCQLFKSYPLTFGQGTKLEIKRTVAAPSVFIFPPSDEQLKSGTASVVCLLNNFYPREAKVQWKVDNALQSGNSQESVTEQDSKDSTYSLSSTLTLSKADYEKHKVYACEVTHQGLSSPVTKSFNRGEC

SEQ ID NO: 454 - protein, 214 aa, synthetic construct
DIQMTQSPSFLSASVGDRVTITCKASQNVGINVVWHQQKPGKAPKALIYSSSHRYSGVPSRFSGSGSGTEFTLTISSLQPEDFATYFCQMFKSYPLTFGQGTKLEIKRTVAAPSVFIFPPSDEQLKSGTASVVCLLNNFYPREAKVQWKVDNALQSGNSQESVTEQDSKDSTYSLSSTLTLSKADYEKHKVYACEVTHQGLSSPVTKSFNRGEC

SEQ ID NO: 455 - protein, 214 aa, synthetic construct
DIQMTQSPSFLSASVGDRVTITCKASQNVGINVVWHQQKPGKAPKALIYSSSHRYSGVPSRFSGSGSGTEFTLTISSLQPEDFATYFCQNFKSYPLTFGQGTKLEIKRTVAAPSVFIFPPSDEQLKSGTASVVCLLNNFYPREAKVQWKVDNALQSGNSQESVTEQDSKDSTYSLSSTLTLSKADYEKHKVYACEVTHQGLSSPVTKSFNRGEC

SEQ ID NO: 456 - protein, 214 aa, synthetic construct
DIQMTQSPSFLSASVGDRVTITCKASQNVGINVVWHQQKPGKAPKALIYSSSHRYSGVPSRFSGSGSGTEFTLTISSLQPEDFATYFCQPFKSYPLTFGQGTKLEIKRTVAAPSVFIFPPSDEQLKSGTASVVCLLNNFYPREAKVQWKVDNALQSGNSQESVTEQDSKDSTYSLSSTLTLSKADYEKHKVYACEVTHQGLSSPVTKSFNRGEC

SEQ ID NO: 457 - protein, 214 aa, synthetic construct
DIQMTQSPSFLSASVGDRVTITCKASQNVGINVVWHQQKPGKAPKALIYSSSHRYSGVPSRFSGSGSGTEFTLTISSLQPEDFATYFCQRFKSYPLTFGQGTKLEIKRTVAAPSVFIFPPSDEQLKSGTASVVCLLNNFYPREAKVQWKVDNALQSGNSQESVTEQDSKDSTYSLSSTLTLSKADYEKHKVYACEVTHQGLSSPVTKSFNRGEC

SEQ ID NO: 458 - protein, 214 aa, synthetic construct
DIQMTQSPSFLSASVGDRVTITCKASQNVGINVVWHQQKPGKAPKALIYSSSHRYSGVPSRFSGSGSGTEFTLTISSLQPEDFATYFCQVFKSYPLTFGQGTKLEIKRTVAAPSVFIFPPSDEQLKSGTASVVCLLNNFYPREAKVQWKVDNALQSGNSQESVTEQDSKDSTYSLSSTLTLSKADYEKHKVYACEVTHQGLSSPVTKSFNRGEC

SEQ ID NO: 459 - protein, 214 aa, synthetic construct
DIQMTQSPSFLSASVGDRVTITCKASQNVGINVVWHQQKPGKAPKALIYSSSHRYSGVPSRFSGSGSGTEFTLTISSLQPEDFATYFCQWFKSYPLTFGQGTKLEIKRTVAAPSVFIFPPSDEQLKSGTASVVCLLNNFYPREAKVQWKVDNALQSGNSQESVTEQDSKDSTYSLSSTLTLSKADYEKHKVYACEVTHQGLSSPVTKSFNRGEC

SEQ ID NO: 460 - protein, 214 aa, synthetic construct
DIQMTQSPSFLSASVGDRVTITCKASQNVGINVVWHQQKPGKAPKALIYSSSHRYSGVPSRFSGSGSGTEFTLTISSLQPEDFATYFCQYFKSYPLTFGQGTKLEIKRTVAAPSVFIFPPSDEQLKSGTASVVCLLNNFYPREAKVQWKVDNALQSGNSQESVTEQDSKDSTYSLSSTLTLSKADYEKHKVYACEVTHQGLSSPVTKSFNRGEC

SEQ ID NO: 461 - protein, 214 aa, synthetic construct
DIQMTQSPSFLSASVGDRVTITCKASQNVGINVVWHQQKPGKAPKALIYSSSHRYSGVPSRFSGSGSGTEFTLTISSLQPEDFATYFCQQAKSYPLTFGQGTKLEIKRTVAAPSVFIFPPSDEQLKSGTASVVCLLNNFYPREAKVQWKVDNALQSGNSQESVTEQDSKDSTYSLSSTLTLSKADYEKHKVYACEVTHQGLSSPVTKSFNRGEC

SEQ ID NO: 462 - protein, 214 aa, synthetic construct
DIQMTQSPSFLSASVGDRVTITCKASQNVGINVVWHQQKPGKAPKALIYSSSHRYSGVPSRFSGSGSGTEFTLTISSLQPEDFATYFCQQDKSYPLTFGQGTKLEIKRTVAAPSVFIFPPSDEQLKSGTASVVCLLNNFYPREAKVQWKVDNALQSGNSQESVTEQDSKDSTYSLSSTLTLSKADYEKHKVYACEVTHQGLSSPVTKSFNRGEC

SEQ ID NO: 463 - protein, 214 aa, synthetic construct
DIQMTQSPSFLSASVGDRVTITCKASQNVGINVVWHQQKPGKAPKALIYSSSHRYSGVPSRFSGSGSGTEFTLTISSLQPEDFATYFCQQEKSYPLTFGQGTKLEIKRTVAAPSVFIFPPSDEQLKSGTASVVCLLNNFYPREAKVQWKVDNALQSGNSQESVTEQDSKDSTYSLSSTLTLSKADYEKHKVYACEVTHQGLSSPVTKSFNRGEC

SEQ ID NO: 464 - protein, 214 aa, synthetic construct
DIQMTQSPSFLSASVGDRVTITCKASQNVGINVVWHQQKPGKAPKALIYSSSHRYSGVPSRFSGSGSGTEFTLTISSLQPEDFATYFCQQGKSYPLTFGQGTKLEIKRTVAAPSVFIFPPSDEQLKSGTASVVCLLNNFYPREAKVQWKVDNALQSGNSQESVTEQDSKDSTYSLSSTLTLSKADYEKHKVYACEVTHQGLSSPVTKSFNRGEC

SEQ ID NO: 465 - protein, 214 aa, synthetic construct
DIQMTQSPSFLSASVGDRVTITCKASQNVGINVVWHQQKPGKAPKALIYSSSHRYSGVPSRFSGSGSGTEFTLTISSLQPEDFATYFCQQHKSYPLTFGQGTKLEIKRTVAAPSVFIFPPSDEQLKSGTASVVCLLNNFYPREAKVQWKVDNALQSGNSQESVTEQDSKDSTYSLSSTLTLSKADYEKHKVYACEVTHQGLSSPVTKSFNRGEC

SEQ ID NO: 466 - protein, 214 aa, synthetic construct
DIQMTQSPSFLSASVGDRVTITCKASQNVGINVVWHQQKPGKAPKALIYSSSHRYSGVPSRFSGSGSGTEFTLTISSLQPEDFATYFCQQIKSYPLTFGQGTKLEIKRTVAAPSVFIFPPSDEQLKSGTASVVCLLNNFYPREAKVQWKVDNALQSGNSQESVTEQDSKDSTYSLSSTLTLSKADYEKHKVYACEVTHQGLSSPVTKSFNRGEC

SEQ ID NO: 467 - protein, 214 aa, synthetic construct
DIQMTQSPSFLSASVGDRVTITCKASQNVGINVVWHQQKPGKAPKALIYSSSHRYSGVPSRFSGSGSGTEFTLTISSLQPEDFATYFCQQKKSYPLTFGQGTKLEIKRTVAAPSVFIFPPSDEQLKSGTASVVCLLNNFYPREAKVQWKVDNALQSGNSQESVTEQDSKDSTYSLSSTLTLSKADYEKHKVYACEVTHQGLSSPVTKSFNRGEC

SEQ ID NO: 468 - protein, 214 aa, synthetic construct
DIQMTQSPSFLSASVGDRVTITCKASQNVGINVVWHQQKPGKAPKALIYSSSHRYSGVPSRFSGSGSGTEFTLTISSLQPEDFATYFCQQLKSYPLTFGQGTKLEIKRTVAAPSVFIFPPSDEQLKSGTASVVCLLNNFYPREAKVQWKVDNALQSGNSQESVTEQDSKDSTYSLSSTLTLSKADYEKHKVYACEVTHQGLSSPVTKSFNRGEC

SEQ ID NO: 469 - protein, 214 aa, synthetic construct
DIQMTQSPSFLSASVGDRVTITCKASQNVGINVVWHQQKPGKAPKALIYSSSHRYSGVPSRFSGSGSGTEFTLTISSLQPEDFATYFCQQMKSYPLTFGQGTKLEIKRTVAAPSVFIFPPSDEQLKSGTASVVCLLNNFYPREAKVQWKVDNALQSGNSQESVTEQDSKDSTYSLSSTLTLSKADYEKHKVYACEVTHQGLSSPVTKSFNRGEC

SEQ ID NO: 470 - protein, 214 aa, synthetic construct
DIQMTQSPSFLSASVGDRVTITCKASQNVGINVVWHQQKPGKAPKALIYSSSHRYSGVPSRFSGSGSGTEFTLTISSLQPEDFATYFCQQNKSYPLTFGQGTKLEIKRTVAAPSVFIFPPSDEQLKSGTASVVCLLNNFYPREAKVQWKVDNALQSGNSQESVTEQDSKDSTYSLSSTLTLSKADYEKHKVYACEVTHQGLSSPVTKSFNRGEC

SEQ ID NO: 471 - protein, 214 aa, synthetic construct
DIQMTQSPSFLSASVGDRVTITCKASQNVGINVVWHQQKPGKAPKALIYSSSHRYSGVPSRFSGSGSGTEFTLTISSLQPEDFATYFCQQPKSYPLTFGQGTKLEIKRTVAAPSVFIFPPSDEQLKSGTASVVCLLNNFYPREAKVQWKVDNALQSGNSQESVTEQDSKDSTYSLSSTLTLSKADYEKHKVYACEVTHQGLSSPVTKSFNRGEC

SEQ ID NO: 472 - protein, 214 aa, synthetic construct
DIQMTQSPSFLSASVGDRVTITCKASQNVGINVVWHQQKPGKAPKALIYSSSHRYSGVPSRFSGSGSGTEFTLTISSLQPEDFATYFCQQQKSYPLTFGQGTKLEIKRTVAAPSVFIFPPSDEQLKSGTASVVCLLNNFYPREAKVQWKVDNALQSGNSQESVTEQDSKDSTYSLSSTLTLSKADYEKHKVYACEVTHQGLSSPVTKSFNRGEC

SEQ ID NO: 473 - protein, 214 aa, synthetic construct
DIQMTQSPSFLSASVGDRVTITCKASQNVGINVVWHQQKPGKAPKALIYSSSHRYSGVPSRFSGSGSGTEFTLTISSLQPEDFATYFCQQRKSYPLTFGQGTKLEIKRTVAAPSVFIFPPSDEQLKSGTASVVCLLNNFYPREAKVQWKVDNALQSGNSQESVTEQDSKDSTYSLSSTLTLSKADYEKHKVYACEVTHQGLSSPVTKSFNRGEC

SEQ ID NO: 474 - protein, 214 aa, synthetic construct
DIQMTQSPSFLSASVGDRVTITCKASQNVGINVVWHQQKPGKAPKALIYSSSHRYSGVPSRFSGSGSGTEFTLTISSLQPEDFATYFCQQSKSYPLTFGQGTKLEIKRTVAAPSVFIFPPSDEQLKSGTASVVCLLNNFYPREAKVQWKVDNALQSGNSQESVTEQDSKDSTYSLSSTLTLSKADYEKHKVYACEVTHQGLSSPVTKSFNRGEC

SEQ ID NO: 475 - protein, 214 aa, synthetic construct
DIQMTQSPSFLSASVGDRVTITCKASQNVGINVVWHQQKPGKAPKALIYSSSHRYSGVPSRFSGSGSGTEFTLTISSLQPEDFATYFCQQTKSYPLTFGQGTKLEIKRTVAAPSVFIFPPSDEQLKSGTASVVCLLNNFYPREAKVQWKVDNALQSGNSQESVTEQDSKDSTYSLSSTLTLSKADYEKHKVYACEVTHQGLSSPVTKSFNRGEC

SEQ ID NO: 476 - protein, 214 aa, synthetic construct
DIQMTQSPSFLSASVGDRVTITCKASQNVGINVVWHQQKPGKAPKALIYSSSHRYSGVPSRFSGSGSGTEFTLTISSLQPEDFATYFCQQVKSYPLTFGQGTKLEIKRTVAAPSVFIFPPSDEQLKSGTASVVCLLNNFYPREAKVQWKVDNALQSGNSQESVTEQDSKDSTYSLSSTLTLSKADYEKHKVYACEVTHQGLSSPVTKSFNRGEC

SEQ ID NO: 477 - protein, 214 aa, synthetic construct
DIQMTQSPSFLSASVGDRVTITCKASQNVGINVVWHQQKPGKAPKALIYSSSHRYSGVPSRFSGSGSGTEFTLTISSLQPEDFATYFCQQWKSYPLTFGQGTKLEIKRTVAAPSVFIFPPSDEQLKSGTASVVCLLNNFYPREAKVQWKVDNALQSGNSQESVTEQDSKDSTYSLSSTLTLSKADYEKHKVYACEVTHQGLSSPVTKSFNRGEC

SEQ ID NO: 478 - protein, 214 aa, synthetic construct
DIQMTQSPSFLSASVGDRVTITCKASQNVGINVVWHQQKPGKAPKALIYSSSHRYSGVPSRFSGSGSGTEFTLTISSLQPEDFATYFCQQYKSYPLTFGQGTKLEIKRTVAAPSVFIFPPSDEQLKSGTASVVCLLNNFYPREAKVQWKVDNALQSGNSQESVTEQDSKDSTYSLSSTLTLSKADYEKHKVYACEVTHQGLSSPVTKSFNRGEC

SEQ ID NO: 479 - protein, 214 aa, synthetic construct
DIQMTQSPSFLSASVGDRVTITCKASQNVGINVVWHQQKPGKAPKALIYSSSHRYSGVPSRFSGSGSGTEFTLTISSLQPEDFATYFCQQFASYPLTFGQGTKLEIKRTVAAPSVFIFPPSDEQLKSGTASVVCLLNNFYPREAKVQWKVDNALQSGNSQESVTEQDSKDSTYSLSSTLTLSKADYEKHKVYACEVTHQGLSSPVTKSFNRGEC

SEQ ID NO: 480 - protein, 214 aa, synthetic construct
DIQMTQSPSFLSASVGDRVTITCKASQNVGINVVWHQQKPGKAPKALIYSSSHRYSGVPSRFSGSGSGTEFTLTISSLQPEDFATYFCQQFDSYPLTFGQGTKLEIKRTVAAPSVFIFPPSDEQLKSGTASVVCLLNNFYPREAKVQWKVDNALQSGNSQESVTEQDSKDSTYSLSSTLTLSKADYEKHKVYACEVTHQGLSSPVTKSFNRGEC

SEQ ID NO: 481 - protein, 214 aa, synthetic construct
DIQMTQSPSFLSASVGDRVTITCKASQNVGINVVWHQQKPGKAPKALIYSSSHRYSGVPSRFSGSGSGTEFTLTISSLQPEDFATYFCQQFESYPLTFGQGTKLEIKRTVAAPSVFIFPPSDEQLKSGTASVVCLLNNFYPREAKVQWKVDNALQSGNSQESVTEQDSKDSTYSLSSTLTLSKADYEKHKVYACEVTHQGLSSPVTKSFNRGEC

SEQ ID NO: 482 - protein, 214 aa, synthetic construct
DIQMTQSPSFLSASVGDRVTITCKASQNVGINVVWHQQKPGKAPKALIYSSSHRYSGVPSRFSGSGSGTEFTLTISSLQPEDFATYFCQQFFSYPLTFGQGTKLEIKRTVAAPSVFIFPPSDEQLKSGTASVVCLLNNFYPREAKVQWKVDNALQSGNSQESVTEQDSKDSTYSLSSTLTLSKADYEKHKVYACEVTHQGLSSPVTKSFNRGEC

SEQ ID NO: 483 - protein, 214 aa, synthetic construct
DIQMTQSPSFLSASVGDRVTITCKASQNVGINVVWHQQKPGKAPKALIYSSSHRYSGVPSRFSGSGSGTEFTLTISSLQPEDFATYFCQQFGSYPLTFGQGTKLEIKRTVAAPSVFIFPPSDEQLKSGTASVVCLLNNFYPREAKVQWKVDNALQSGNSQESVTEQDSKDSTYSLSSTLTLSKADYEKHKVYACEVTHQGLSSPVTKSFNRGEC

SEQ ID NO: 484 - protein, 214 aa, synthetic construct
DIQMTQSPSFLSASVGDRVTITCKASQNVGINVVWHQQKPGKAPKALIYSSSHRYSGVPSRFSGSGSGTEFTLTISSLQPEDFATYFCQQFHSYPLTFGQGTKLEIKRTVAAPSVFIFPPSDEQLKSGTASVVCLLNNFYPREAKVQWKVDNALQSGNSQESVTEQDSKDSTYSLSSTLTLSKADYEKHKVYACEVTHQGLSSPVTKSFNRGEC

SEQ ID NO: 485 - protein, 214 aa, synthetic construct
DIQMTQSPSFLSASVGDRVTITCKASQNVGINVVWHQQKPGKAPKALIYSSSHRYSGVPSRFSGSGSGTEFTLTISSLQPEDFATYFCQQFISYPLTFGQGTKLEIKRTVAAPSVFIFPPSDEQLKSGTASVVCLLNNFYPREAKVQWKVDNALQSGNSQESVTEQDSKDSTYSLSSTLTLSKADYEKHKVYACEVTHQGLSSPVTKSFNRGEC

SEQ ID NO: 486 - protein, 214 aa, synthetic construct
DIQMTQSPSFLSASVGDRVTITCKASQNVGINVVWHQQKPGKAPKALIYSSSHRYSGVPSRFSGSGSGTEFTLTISSLQPEDFATYFCQQFLSYPLTFGQGTKLEIKRTVAAPSVFIFPPSDEQLKSGTASVVCLLNNFYPREAKVQWKVDNALQSGNSQESVTEQDSKDSTYSLSSTLTLSKADYEKHKVYACEVTHQGLSSPVTKSFNRGEC

SEQ ID NO: 487 - protein, 214 aa, synthetic construct
DIQMTQSPSFLSASVGDRVTITCKASQNVGINVVWHQQKPGKAPKALIYSSSHRYSGVPSRFSGSGSGTEFTLTISSLQPEDFATYFCQQFMSYPLTFGQGTKLEIKRTVAAPSVFIFPPSDEQLKSGTASVVCLLNNFYPREAKVQWKVDNALQSGNSQESVTEQDSKDSTYSLSSTLTLSKADYEKHKVYACEVTHQGLSSPVTKSFNRGEC

SEQ ID NO: 488 - protein, 214 aa, synthetic construct
DIQMTQSPSFLSASVGDRVTITCKASQNVGINVVWHQQKPGKAPKALIYSSSHRYSGVPSRFSGSGSGTEFTLTISSLQPEDFATYFCQQFNSYPLTFGQGTKLEIKRTVAAPSVFIFPPSDEQLKSGTASVVCLLNNFYPREAKVQWKVDNALQSGNSQESVTEQDSKDSTYSLSSTLTLSKADYEKHKVYACEVTHQGLSSPVTKSFNRGEC

SEQ ID NO: 489 - protein, 214 aa, synthetic construct
DIQMTQSPSFLSASVGDRVTITCKASQNVGINVVWHQQKPGKAPKALIYSSSHRYSGVPSRFSGSGSGTEFTLTISSLQPEDFATYFCQQFPSYPLTFGQGTKLEIKRTVAAPSVFIFPPSDEQLKSGTASVVCLLNNFYPREAKVQWKVDNALQSGNSQESVTEQDSKDSTYSLSSTLTLSKADYEKHKVYACEVTHQGLSSPVTKSFNRGEC

SEQ ID NO: 490 - protein, 214 aa, synthetic construct
DIQMTQSPSFLSASVGDRVTITCKASQNVGINVVWHQQKPGKAPKALIYSSSHRYSGVPSRFSGSGSGTEFTLTISSLQPEDFATYFCQQFQSYPLTFGQGTKLEIKRTVAAPSVFIFPPSDEQLKSGTASVVCLLNNFYPREAKVQWKVDNALQSGNSQESVTEQDSKDSTYSLSSTLTLSKADYEKHKVYACEVTHQGLSSPVTKSFNRGEC

SEQ ID NO: 491 - protein, 214 aa, synthetic construct
DIQMTQSPSFLSASVGDRVTITCKASQNVGINVVWHQQKPGKAPKALIYSSSHRYSGVPSRFSGSGSGTEFTLTISSLQPEDFATYFCQQFRSYPLTFGQGTKLEIKRTVAAPSVFIFPPSDEQLKSGTASVVCLLNNFYPREAKVQWKVDNALQSGNSQESVTEQDSKDSTYSLSSTLTLSKADYEKHKVYACEVTHQGLSSPVTKSFNRGEC

SEQ ID NO: 492 - protein, 214 aa, synthetic construct
DIQMTQSPSFLSASVGDRVTITCKASQNVGINVVWHQQKPGKAPKALIYSSSHRYSGVPSRFSGSGSGTEFTLTISSLQPEDFATYFCQQFSSYPLTFGQGTKLEIKRTVAAPSVFIFPPSDEQLKSGTASVVCLLNNFYPREAKVQWKVDNALQSGNSQESVTEQDSKDSTYSLSSTLTLSKADYEKHKVYACEVTHQGLSSPVTKSFNRGEC

SEQ ID NO: 493 - protein, 214 aa, synthetic construct
DIQMTQSPSFLSASVGDRVTITCKASQNVGINVVWHQQKPGKAPKALIYSSSHRYSGVPSRFSGSGSGTEFTLTISSLQPEDFATYFCQQFTSYPLTFGQGTKLEIKRTVAAPSVFIFPPSDEQLKSGTASVVCLLNNFYPREAKVQWKVDNALQSGNSQESVTEQDSKDSTYSLSSTLTLSKADYEKHKVYACEVTHQGLSSPVTKSFNRGEC

SEQ ID NO: 494 - protein, 214 aa, synthetic construct
DIQMTQSPSFLSASVGDRVTITCKASQNVGINVVWHQQKPGKAPKALIYSSSHRYSGVPSRFSGSGSGTEFTLTISSLQPEDFATYFCQQFVSYPLTFGQGTKLEIKRTVAAPSVFIFPPSDEQLKSGTASVVCLLNNFYPREAKVQWKVDNALQSGNSQESVTEQDSKDSTYSLSSTLTLSKADYEKHKVYACEVTHQGLSSPVTKSFNRGEC

SEQ ID NO: 495 - protein, 214 aa, synthetic construct
DIQMTQSPSFLSASVGDRVTITCKASQNVGINVVWHQQKPGKAPKALIYSSSHRYSGVPSRFSGSGSGTEFTLTISSLQPEDFATYFCQQFWSYPLTFGQGTKLEIKRTVAAPSVFIFPPSDEQLKSGTASVVCLLNNFYPREAKVQWKVDNALQSGNSQESVTEQDSKDSTYSLSSTLTLSKADYEKHKVYACEVTHQGLSSPVTKSFNRGEC

SEQ ID NO: 496 - protein, 214 aa, synthetic construct
DIQMTQSPSFLSASVGDRVTITCKASQNVGINVVWHQQKPGKAPKALIYSSSHRYSGVPSRFSGSGSGTEFTLTISSLQPEDFATYFCQQFYSYPLTFGQGTKLEIKRTVAAPSVFIFPPSDEQLKSGTASVVCLLNNFYPREAKVQWKVDNALQSGNSQESVTEQDSKDSTYSLSSTLTLSKADYEKHKVYACEVTHQGLSSPVTKSFNRGEC

SEQ ID NO: 497 - protein, 214 aa, synthetic construct
DIQMTQSPSFLSASVGDRVTITCKASQNVGINVVWHQQKPGKAPKALIYSSSHRYSGVPSRFSGSGSGTEFTLTISSLQPEDFATYFCQQFKAYPLTFGQGTKLEIKRTVAAPSVFIFPPSDEQLKSGTASVVCLLNNFYPREAKVQWKVDNALQSGNSQESVTEQDSKDSTYSLSSTLTLSKADYEKHKVYACEVTHQGLSSPVTKSFNRGEC

SEQ ID NO: 498 - protein, 214 aa, synthetic construct
DIQMTQSPSFLSASVGDRVTITCKASQNVGINVVWHQQKPGKAPKALIYSSSHRYSGVPSRFSGSGSGTEFTLTISSLQPEDFATYFCQQFKDYPLTFGQGTKLEIKRTVAAPSVFIFPPSDEQLKSGTASVVCLLNNFYPREAKVQWKVDNALQSGNSQESVTEQDSKDSTYSLSSTLTLSKADYEKHKVYACEVTHQGLSSPVTKSFNRGEC

SEQ ID NO: 499 - protein, 214 aa, synthetic construct
DIQMTQSPSFLSASVGDRVTITCKASQNVGINVVWHQQKPGKAPKALIYSSSHRYSGVPSRFSGSGSGTEFTLTISSLQPEDFATYFCQQFKFYPLTFGQGTKLEIKRTVAAPSVFIFPPSDEQLKSGTASVVCLLNNFYPREAKVQWKVDNALQSGNSQESVTEQDSKDSTYSLSSTLTLSKADYEKHKVYACEVTHQGLSSPVTKSFNRGEC

SEQ ID NO: 500 - protein, 214 aa, synthetic construct
DIQMTQSPSFLSASVGDRVTITCKASQNVGINVVWHQQKPGKAPKALIYSSSHRYSGVPSRFSGSGSGTEFTLTISSLQPEDFATYFCQQFKGYPLTFGQGTKLEIKRTVAAPSVFIFPPSDEQLKSGTASVVCLLNNFYPREAKVQWKVDNALQSGNSQESVTEQDSKDSTYSLSSTLTLSKADYEKHKVYACEVTHQGLSSPVTKSFNRGEC

SEQ ID NO: 501 - protein, 214 aa, synthetic construct
DIQMTQSPSFLSASVGDRVTITCKASQNVGINVVWHQQKPGKAPKALIYSSSHRYSGVPSRFSGSGSGTEFTLTISSLQPEDFATYFCQQFKIYPLTFGQGTKLEIKRTVAAPSVFIFPPSDEQLKSGTASVVCLLNNFYPREAKVQWKVDNALQSGNSQESVTEQDSKDSTYSLSSTLTLSKADYEKHKVYACEVTHQGLSSPVTKSFNRGEC

SEQ ID NO: 502 - protein, 214 aa, synthetic construct
DIQMTQSPSFLSASVGDRVTITCKASQNVGINVVWHQQKPGKAPKALIYSSSHRYSGVPSRFSGSGSGTEFTLTISSLQPEDFATYFCQQFKKYPLTFGQGTKLEIKRTVAAPSVFIFPPSDEQLKSGTASVVCLLNNFYPREAKVQWKVDNALQSGNSQESVTEQDSKDSTYSLSSTLTLSKADYEKHKVYACEVTHQGLSSPVTKSFNRGEC

SEQ ID NO: 503 - protein, 214 aa, synthetic construct
DIQMTQSPSFLSASVGDRVTITCKASQNVGINVVWHQQKPGKAPKALIYSSSHRYSGVPSRFSGSGSGTEFTLTISSLQPEDFATYFCQQFKLYPLTFGQGTKLEIKRTVAAPSVFIFPPSDEQLKSGTASVVCLLNNFYPREAKVQWKVDNALQSGNSQESVTEQDSKDSTYSLSSTLTLSKADYEKHKVYACEVTHQGLSSPVTKSFNRGEC

SEQ ID NO: 504 - protein, 214 aa, synthetic construct
DIQMTQSPSFLSASVGDRVTITCKASQNVGINVVWHQQKPGKAPKALIYSSSHRYSGVPSRFSGSGSGTEFTLTISSLQPEDFATYFCQQFKMYPLTFGQGTKLEIKRTVAAPSVFIFPPSDEQLKSGTASVVCLLNNFYPREAKVQWKVDNALQSGNSQESVTEQDSKDSTYSLSSTLTLSKADYEKHKVYACEVTHQGLSSPVTKSFNRGEC

SEQ ID NO: 505 - protein, 214 aa, synthetic construct
DIQMTQSPSFLSASVGDRVTITCKASQNVGINVVWHQQKPGKAPKALIYSSSHRYSGVPSRFSGSGSGTEFTLTISSLQPEDFATYFCQQFKNYPLTFGQGTKLEIKRTVAAPSVFIFPPSDEQLKSGTASVVCLLNNFYPREAKVQWKVDNALQSGNSQESVTEQDSKDSTYSLSSTLTLSKADYEKHKVYACEVTHQGLSSPVTKSFNRGEC

SEQ ID NO: 506 - protein, 214 aa, synthetic construct
DIQMTQSPSFLSASVGDRVTITCKASQNVGINVVWHQQKPGKAPKALIYSSSHRYSGVPSRFSGSGSGTEFTLTISSLQPEDFATYFCQQFKQYPLTFGQGTKLEIKRTVAAPSVFIFPPSDEQLKSGTASVVCLLNNFYPREAKVQWKVDNALQSGNSQESVTEQDSKDSTYSLSSTLTLSKADYEKHKVYACEVTHQGLSSPVTKSFNRGEC

SEQ ID NO: 507 - protein, 214 aa, synthetic construct
DIQMTQSPSFLSASVGDRVTITCKASQNVGINVVWHQQKPGKAPKALIYSSSHRYSGVPSRFSGSGSGTEFTLTISSLQPEDFATYFCQQFKRYPLTFGQGTKLEIKRTVAAPSVFIFPPSDEQLKSGTASVVCLLNNFYPREAKVQWKVDNALQSGNSQESVTEQDSKDSTYSLSSTLTLSKADYEKHKVYACEVTHQGLSSPVTKSFNRGEC

SEQ ID NO: 508 - protein, 214 aa, synthetic construct
DIQMTQSPSFLSASVGDRVTITCKASQNVGINVVWHQQKPGKAPKALIYSSSHRYSGVPSRFSGSGSGTEFTLTISSLQPEDFATYFCQQFKTYPLTFGQGTKLEIKRTVAAPSVFIFPPSDEQLKSGTASVVCLLNNFYPREAKVQWKVDNALQSGNSQESVTEQDSKDSTYSLSSTLTLSKADYEKHKVYACEVTHQGLSSPVTKSFNRGEC

SEQ ID NO: 509 - protein, 214 aa, synthetic construct
DIQMTQSPSFLSASVGDRVTITCKASQNVGINVVWHQQKPGKAPKALIYSSSHRYSGVPSRFSGSGSGTEFTLTISSLQPEDFATYFCQQFKVYPLTFGQGTKLEIKRTVAAPSVFIFPPSDEQLKSGTASVVCLLNNFYPREAKVQWKVDNALQSGNSQESVTEQDSKDSTYSLSSTLTLSKADYEKHKVYACEVTHQGLSSPVTKSFNRGEC

SEQ ID NO: 510 - protein, 214 aa, synthetic construct
DIQMTQSPSFLSASVGDRVTITCKASQNVGINVVWHQQKPGKAPKALIYSSSHRYSGVPSRFSGSGSGTEFTLTISSLQPEDFATYFCQQFKWYPLTFGQGTKLEIKRTVAAPSVFIFPPSDEQLKSGTASVVCLLNNFYPREAKVQWKVDNALQSGNSQESVTEQDSKDSTYSLSSTLTLSKADYEKHKVYACEVTHQGLSSPVTKSFNRGEC

SEQ ID NO: 511 - protein, 214 aa, synthetic construct
DIQMTQSPSFLSASVGDRVTITCKASQNVGINVVWHQQKPGKAPKALIYSSSHRYSGVPSRFSGSGSGTEFTLTISSLQPEDFATYFCQQFKSAPLTFGQGTKLEIKRTVAAPSVFIFPPSDEQLKSGTASVVCLLNNFYPREAKVQWKVDNALQSGNSQESVTEQDSKDSTYSLSSTLTLSKADYEKHKVYACEVTHQGLSSPVTKSFNRGEC

SEQ ID NO: 512 - protein, 214 aa, synthetic construct
DIQMTQSPSFLSASVGDRVTITCKASQNVGINVVWHQQKPGKAPKALIYSSSHRYSGVPSRFSGSGSGTEFTLTISSLQPEDFATYFCQQFKSDPLTFGQGTKLEIKRTVAAPSVFIFPPSDEQLKSGTASVVCLLNNFYPREAKVQWKVDNALQSGNSQESVTEQDSKDSTYSLSSTLTLSKADYEKHKVYACEVTHQGLSSPVTKSFNRGEC

SEQ ID NO: 513 - protein, 214 aa, synthetic construct
DIQMTQSPSFLSASVGDRVTITCKASQNVGINVVWHQQKPGKAPKALIYSSSHRYSGVPSRFSGSGSGTEFTLTISSLQPEDFATYFCQQFKSEPLTFGQGTKLEIKRTVAAPSVFIFPPSDEQLKSGTASVVCLLNNFYPREAKVQWKVDNALQSGNSQESVTEQDSKDSTYSLSSTLTLSKADYEKHKVYACEVTHQGLSSPVTKSFNRGEC

SEQ ID NO: 514 - protein, 214 aa, synthetic construct
DIQMTQSPSFLSASVGDRVTITCKASQNVGINVVWHQQKPGKAPKALIYSSSHRYSGVPSRFSGSGSGTEFTLTISSLQPEDFATYFCQQFKSFPLTFGQGTKLEIKRTVAAPSVFIFPPSDEQLKSGTASVVCLLNNFYPREAKVQWKVDNALQSGNSQESVTEQDSKDSTYSLSSTLTLSKADYEKHKVYACEVTHQGLSSPVTKSFNRGEC

SEQ ID NO: 515 - protein, 214 aa, synthetic construct
DIQMTQSPSFLSASVGDRVTITCKASQNVGINVVWHQQKPGKAPKALIYSSSHRYSGVPSRFSGSGSGTEFTLTISSLQPEDFATYFCQQFKSGPLTFGQGTKLEIKRTVAAPSVFIFPPSDEQLKSGTASVVCLLNNFYPREAKVQWKVDNALQSGNSQESVTEQDSKDSTYSLSSTLTLSKADYEKHKVYACEVTHQGLSSPVTKSFNRGEC

SEQ ID NO: 516 - protein, 214 aa, synthetic construct
DIQMTQSPSFLSASVGDRVTITCKASQNVGINVVWHQQKPGKAPKALIYSSSHRYSGVPSRFSGSGSGTEFTLTISSLQPEDFATYFCQQFKSIPLTFGQGTKLEIKRTVAAPSVFIFPPSDEQLKSGTASVVCLLNNFYPREAKVQWKVDNALQSGNSQESVTEQDSKDSTYSLSSTLTLSKADYEKHKVYACEVTHQGLSSPVTKSFNRGEC

SEQ ID NO: 517 - protein, 214 aa, synthetic construct
DIQMTQSPSFLSASVGDRVTITCKASQNVGINVVWHQQKPGKAPKALIYSSSHRYSGVPSRFSGSGSGTEFTLTISSLQPEDFATYFCQQFKSKPLTFGQGTKLEIKRTVAAPSVFIFPPSDEQLKSGTASVVCLLNNFYPREAKVQWKVDNALQSGNSQESVTEQDSKDSTYSLSSTLTLSKADYEKHKVYACEVTHQGLSSPVTKSFNRGEC

SEQ ID NO: 518 - protein, 214 aa, synthetic construct
DIQMTQSPSFLSASVGDRVTITCKASQNVGINVVWHQQKPGKAPKALIYSSSHRYSGVPSRFSGSGSGTEFTLTISSLQPEDFATYFCQQFKSLPLTFGQGTKLEIKRTVAAPSVFIFPPSDEQLKSGTASVVCLLNNFYPREAKVQWKVDNALQSGNSQESVTEQDSKDSTYSLSSTLTLSKADYEKHKVYACEVTHQGLSSPVTKSFNRGEC

SEQ ID NO: 519 - protein, 214 aa, synthetic construct
DIQMTQSPSFLSASVGDRVTITCKASQNVGINVVWHQQKPGKAPKALIYSSSHRYSGVPSRFSGSGSGTEFTLTISSLQPEDFATYFCQQFKSNPLTFGQGTKLEIKRTVAAPSVFIFPPSDEQLKSGTASVVCLLNNFYPREAKVQWKVDNALQSGNSQESVTEQDSKDSTYSLSSTLTLSKADYEKHKVYACEVTHQGLSSPVTKSFNRGEC

SEQ ID NO: 520 - protein, 214 aa, synthetic construct
DIQMTQSPSFLSASVGDRVTITCKASQNVGINVVWHQQKPGKAPKALIYSSSHRYSGVPSRFSGSGSGTEFTLTISSLQPEDFATYFCQQFKSPPLTFGQGTKLEIKRTVAAPSVFIFPPSDEQLKSGTASVVCLLNNFYPREAKVQWKVDNALQSGNSQESVTEQDSKDSTYSLSSTLTLSKADYEKHKVYACEVTHQGLSSPVTKSFNRGEC

SEQ ID NO: 521 - protein, 214 aa, synthetic construct
DIQMTQSPSFLSASVGDRVTITCKASQNVGINVVWHQQKPGKAPKALIYSSSHRYSGVPSRFSGSGSGTEFTLTISSLQPEDFATYFCQQFKSQPLTFGQGTKLEIKRTVAAPSVFIFPPSDEQLKSGTASVVCLLNNFYPREAKVQWKVDNALQSGNSQESVTEQDSKDSTYSLSSTLTLSKADYEKHKVYACEVTHQGLSSPVTKSFNRGEC

SEQ ID NO: 522 - protein, 214 aa, synthetic construct
DIQMTQSPSFLSASVGDRVTITCKASQNVGINVVWHQQKPGKAPKALIYSSSHRYSGVPSRFSGSGSGTEFTLTISSLQPEDFATYFCQQFKSRPLTFGQGTKLEIKRTVAAPSVFIFPPSDEQLKSGTASVVCLLNNFYPREAKVQWKVDNALQSGNSQESVTEQDSKDSTYSLSSTLTLSKADYEKHKVYACEVTHQGLSSPVTKSFNRGEC

SEQ ID NO: 523 - protein, 214 aa, synthetic construct
DIQMTQSPSFLSASVGDRVTITCKASQNVGINVVWHQQKPGKAPKALIYSSSHRYSGVPSRFSGSGSGTEFTLTISSLQPEDFATYFCQQFKSSPLTFGQGTKLEIKRTVAAPSVFIFPPSDEQLKSGTASVVCLLNNFYPREAKVQWKVDNALQSGNSQESVTEQDSKDSTYSLSSTLTLSKADYEKHKVYACEVTHQGLSSPVTKSFNRGEC

SEQ ID NO: 524 - protein, 214 aa, synthetic construct
DIQMTQSPSFLSASVGDRVTITCKASQNVGINVVWHQQKPGKAPKALIYSSSHRYSGVPSRFSGSGSGTEFTLTISSLQPEDFATYFCQQFKSVPLTFGQGTKLEIKRTVAAPSVFIFPPSDEQLKSGTASVVCLLNNFYPREAKVQWKVDNALQSGNSQESVTEQDSKDSTYSLSSTLTLSKADYEKHKVYACEVTHQGLSSPVTKSFNRGEC

SEQ ID NO: 525 - protein, 214 aa, synthetic construct
DIQMTQSPSFLSASVGDRVTITCKASQNVGINVVWHQQKPGKAPKALIYSSSHRYSGVPSRFSGSGSGTEFTLTISSLQPEDFATYFCQQFKSWPLTFGQGTKLEIKRTVAAPSVFIFPPSDEQLKSGTASVVCLLNNFYPREAKVQWKVDNALQSGNSQESVTEQDSKDSTYSLSSTLTLSKADYEKHKVYACEVTHQGLSSPVTKSFNRGEC

SEQ ID NO: 526 - protein, 214 aa, synthetic construct
DIQMTQSPSFLSASVGDRVTITCKASQNVGINVVWHQQKPGKAPKALIYSSSHRYSGVPSRFSGSGSGTEFTLTISSLQPEDFATYFCQQFKSYALTFGQGTKLEIKRTVAAPSVFIFPPSDEQLKSGTASVVCLLNNFYPREAKVQWKVDNALQSGNSQESVTEQDSKDSTYSLSSTLTLSKADYEKHKVYACEVTHQGLSSPVTKSFNRGEC

SEQ ID NO: 527 - protein, 214 aa, synthetic construct
DIQMTQSPSFLSASVGDRVTITCKASQNVGINVVWHQQKPGKAPKALIYSSSHRYSGVPSRFSGSGSGTEFTLTISSLQPEDFATYFCQQFKSYDLTFGQGTKLEIKRTVAAPSVFIFPPSDEQLKSGTASVVCLLNNFYPREAKVQWKVDNALQSGNSQESVTEQDSKDSTYSLSSTLTLSKADYEKHKVYACEVTHQGLSSPVTKSFNRGEC

SEQ ID NO: 528 - protein, 214 aa, synthetic construct
DIQMTQSPSFLSASVGDRVTITCKASQNVGINVVWHQQKPGKAPKALIYSSSHRYSGVPSRFSGSGSGTEFTLTISSLQPEDFATYFCQQFKSYELTFGQGTKLEIKRTVAAPSVFIFPPSDEQLKSGTASVVCLLNNFYPREAKVQWKVDNALQSGNSQESVTEQDSKDSTYSLSSTLTLSKADYEKHKVYACEVTHQGLSSPVTKSFNRGEC

SEQ ID NO: 529 - protein, 214 aa, synthetic construct
DIQMTQSPSFLSASVGDRVTITCKASQNVGINVVWHQQKPGKAPKALIYSSSHRYSGVPSRFSGSGSGTEFTLTISSLQPEDFATYFCQQFKSYFLTFGQGTKLEIKRTVAAPSVFIFPPSDEQLKSGTASVVCLLNNFYPREAKVQWKVDNALQSGNSQESVTEQDSKDSTYSLSSTLTLSKADYEKHKVYACEVTHQGLSSPVTKSFNRGEC

SEQ ID NO: 530 - protein, 214 aa, synthetic construct
DIQMTQSPSFLSASVGDRVTITCKASQNVGINVVWHQQKPGKAPKALIYSSSHRYSGVPSRFSGSGSGTEFTLTISSLQPEDFATYFCQQFKSYGLTFGQGTKLEIKRTVAAPSVFIFPPSDEQLKSGTASVVCLLNNFYPREAKVQWKVDNALQSGNSQESVTEQDSKDSTYSLSSTLTLSKADYEKHKVYACEVTHQGLSSPVTKSFNRGEC

SEQ ID NO: 531 - protein, 214 aa, synthetic construct
DIQMTQSPSFLSASVGDRVTITCKASQNVGINVVWHQQKPGKAPKALIYSSSHRYSGVPSRFSGSGSGTEFTLTISSLQPEDFATYFCQQFKSYHLTFGQGTKLEIKRTVAAPSVFIFPPSDEQLKSGTASVVCLLNNFYPREAKVQWKVDNALQSGNSQESVTEQDSKDSTYSLSSTLTLSKADYEKHKVYACEVTHQGLSSPVTKSFNRGEC

SEQ ID NO: 532 - protein, 214 aa, synthetic construct
DIQMTQSPSFLSASVGDRVTITCKASQNVGINVVWHQQKPGKAPKALIYSSSHRYSGVPSRFSGSGSGTEFTLTISSLQPEDFATYFCQQFKSYKLTFGQGTKLEIKRTVAAPSVFIFPPSDEQLKSGTASVVCLLNNFYPREAKVQWKVDNALQSGNSQESVTEQDSKDSTYSLSSTLTLSKADYEKHKVYACEVTHQGLSSPVTKSFNRGEC

SEQ ID NO: 533 - protein, 214 aa, synthetic construct
DIQMTQSPSFLSASVGDRVTITCKASQNVGINVVWHQQKPGKAPKALIYSSSHRYSGVPSRFSGSGSGTEFTLTISSLQPEDFATYFCQQFKSYLLTFGQGTKLEIKRTVAAPSVFIFPPSDEQLKSGTASVVCLLNNFYPREAKVQWKVDNALQSGNSQESVTEQDSKDSTYSLSSTLTLSKADYEKHKVYACEVTHQGLSSPVTKSFNRGEC

SEQ ID NO: 534 - protein, 214 aa, synthetic construct
DIQMTQSPSFLSASVGDRVTITCKASQNVGINVVWHQQKPGKAPKALIYSSSHRYSGVPSRFSGSGSGTEFTLTISSLQPEDFATYFCQQFKSYMLTFGQGTKLEIKRTVAAPSVFIFPPSDEQLKSGTASVVCLLNNFYPREAKVQWKVDNALQSGNSQESVTEQDSKDSTYSLSSTLTLSKADYEKHKVYACEVTHQGLSSPVTKSFNRGEC

SEQ ID NO: 535 - protein, 214 aa, synthetic construct
DIQMTQSPSFLSASVGDRVTITCKASQNVGINVVWHQQKPGKAPKALIYSSSHRYSGVPSRFSGSGSGTEFTLTISSLQPEDFATYFCQQFKSYNLTFGQGTKLEIKRTVAAPSVFIFPPSDEQLKSGTASVVCLLNNFYPREAKVQWKVDNALQSGNSQESVTEQDSKDSTYSLSSTLTLSKADYEKHKVYACEVTHQGLSSPVTKSFNRGEC

SEQ ID NO: 536 - protein, 214 aa, synthetic construct
DIQMTQSPSFLSASVGDRVTITCKASQNVGINVVWHQQKPGKAPKALIYSSSHRYSGVPSRFSGSGSGTEFTLTISSLQPEDFATYFCQQFKSYQLTFGQGTKLEIKRTVAAPSVFIFPPSDEQLKSGTASVVCLLNNFYPREAKVQWKVDNALQSGNSQESVTEQDSKDSTYSLSSTLTLSKADYEKHKVYACEVTHQGLSSPVTKSFNRGEC

SEQ ID NO: 537 - protein, 214 aa, synthetic construct
DIQMTQSPSFLSASVGDRVTITCKASQNVGINVVWHQQKPGKAPKALIYSSSHRYSGVPSRFSGSGSGTEFTLTISSLQPEDFATYFCQQFKSYRLTFGQGTKLEIKRTVAAPSVFIFPPSDEQLKSGTASVVCLLNNFYPREAKVQWKVDNALQSGNSQESVTEQDSKDSTYSLSSTLTLSKADYEKHKVYACEVTHQGLSSPVTKSFNRGEC

SEQ ID NO: 538 - protein, 214 aa, synthetic construct
DIQMTQSPSFLSASVGDRVTITCKASQNVGINVVWHQQKPGKAPKALIYSSSHRYSGVPSRFSGSGSGTEFTLTISSLQPEDFATYFCQQFKSYSLTFGQGTKLEIKRTVAAPSVFIFPPSDEQLKSGTASVVCLLNNFYPREAKVQWKVDNALQSGNSQESVTEQDSKDSTYSLSSTLTLSKADYEKHKVYACEVTHQGLSSPVTKSFNRGEC

SEQ ID NO: 539 - protein, 214 aa, synthetic construct
DIQMTQSPSFLSASVGDRVTITCKASQNVGINVVWHQQKPGKAPKALIYSSSHRYSGVPSRFSGSGSGTEFTLTISSLQPEDFATYFCQQFKSYTLTFGQGTKLEIKRTVAAPSVFIFPPSDEQLKSGTASVVCLLNNFYPREAKVQWKVDNALQSGNSQESVTEQDSKDSTYSLSSTLTLSKADYEKHKVYACEVTHQGLSSPVTKSFNRGEC

SEQ ID NO: 540 - protein, 214 aa, synthetic construct
DIQMTQSPSFLSASVGDRVTITCKASQNVGINVVWHQQKPGKAPKALIYSSSHRYSGVPSRFSGSGSGTEFTLTISSLQPEDFATYFCQQFKSYVLTFGQGTKLEIKRTVAAPSVFIFPPSDEQLKSGTASVVCLLNNFYPREAKVQWKVDNALQSGNSQESVTEQDSKDSTYSLSSTLTLSKADYEKHKVYACEVTHQGLSSPVTKSFNRGEC

SEQ ID NO: 541 - protein, 214 aa, synthetic construct
DIQMTQSPSFLSASVGDRVTITCKASQNVGINVVWHQQKPGKAPKALIYSSSHRYSGVPSRFSGSGSGTEFTLTISSLQPEDFATYFCQQFKSYWLTFGQGTKLEIKRTVAAPSVFIFPPSDEQLKSGTASVVCLLNNFYPREAKVQWKVDNALQSGNSQESVTEQDSKDSTYSLSSTLTLSKADYEKHKVYACEVTHQGLSSPVTKSFNRGEC

SEQ ID NO: 542 - protein, 214 aa, synthetic construct
DIQMTQSPSFLSASVGDRVTITCKASQNVGINVVWHQQKPGKAPKALIYSSSHRYSGVPSRFSGSGSGTEFTLTISSLQPEDFATYFCQQFKSYPATFGQGTKLEIKRTVAAPSVFIFPPSDEQLKSGTASVVCLLNNFYPREAKVQWKVDNALQSGNSQESVTEQDSKDSTYSLSSTLTLSKADYEKHKVYACEVTHQGLSSPVTKSFNRGEC

SEQ ID NO: 543 - protein, 214 aa, synthetic construct
DIQMTQSPSFLSASVGDRVTITCKASQNVGINVVWHQQKPGKAPKALIYSSSHRYSGVPSRFSGSGSGTEFTLTISSLQPEDFATYFCQQFKSYPDTFGQGTKLEIKRTVAAPSVFIFPPSDEQLKSGTASVVCLLNNFYPREAKVQWKVDNALQSGNSQESVTEQDSKDSTYSLSSTLTLSKADYEKHKVYACEVTHQGLSSPVTKSFNRGEC

SEQ ID NO: 544 - protein, 214 aa, synthetic construct
DIQMTQSPSFLSASVGDRVTITCKASQNVGINVVWHQQKPGKAPKALIYSSSHRYSGVPSRFSGSGSGTEFTLTISSLQPEDFATYFCQQFKSYPETFGQGTKLEIKRTVAAPSVFIFPPSDEQLKSGTASVVCLLNNFYPREAKVQWKVDNALQSGNSQESVTEQDSKDSTYSLSSTLTLSKADYEKHKVYACEVTHQGLSSPVTKSFNRGEC

SEQ ID NO: 545 - protein, 214 aa, synthetic construct
DIQMTQSPSFLSASVGDRVTITCKASQNVGINVVWHQQKPGKAPKALIYSSSHRYSGVPSRFSGSGSGTEFTLTISSLQPEDFATYFCQQFKSYPFTFGQGTKLEIKRTVAAPSVFIFPPSDEQLKSGTASVVCLLNNFYPREAKVQWKVDNALQSGNSQESVTEQDSKDSTYSLSSTLTLSKADYEKHKVYACEVTHQGLSSPVTKSFNRGEC

SEQ ID NO: 546 - protein, 214 aa, synthetic construct
DIQMTQSPSFLSASVGDRVTITCKASQNVGINVVWHQQKPGKAPKALIYSSSHRYSGVPSRFSGSGSGTEFTLTISSLQPEDFATYFCQQFKSYPGTFGQGTKLEIKRTVAAPSVFIFPPSDEQLKSGTASVVCLLNNFYPREAKVQWKVDNALQSGNSQESVTEQDSKDSTYSLSSTLTLSKADYEKHKVYACEVTHQGLSSPVTKSFNRGEC

SEQ ID NO: 547 - protein, 214 aa, synthetic construct
DIQMTQSPSFLSASVGDRVTITCKASQNVGINVVWHQQKPGKAPKALIYSSSHRYSGVPSRFSGSGSGTEFTLTISSLQPEDFATYFCQQFKSYPHTFGQGTKLEIKRTVAAPSVFIFPPSDEQLKSGTASVVCLLNNFYPREAKVQWKVDNALQSGNSQESVTEQDSKDSTYSLSSTLTLSKADYEKHKVYACEVTHQGLSSPVTKSFNRGEC

SEQ ID NO: 548 - protein, 214 aa, synthetic construct
DIQMTQSPSFLSASVGDRVTITCKASQNVGINVVWHQQKPGKAPKALIYSSSHRYSGVPSRFSGSGSGTEFTLTISSLQPEDFATYFCQQFKSYPITFGQGTKLEIKRTVAAPSVFIFPPSDEQLKSGTASVVCLLNNFYPREAKVQWKVDNALQSGNSQESVTEQDSKDSTYSLSSTLTLSKADYEKHKVYACEVTHQGLSSPVTKSFNRGEC

SEQ ID NO: 549 - protein, 214 aa, synthetic construct
DIQMTQSPSFLSASVGDRVTITCKASQNVGINVVWHQQKPGKAPKALIYSSSHRYSGVPSRFSGSGSGTEFTLTISSLQPEDFATYFCQQFKSYPMTFGQGTKLEIKRTVAAPSVFIFPPSDEQLKSGTASVVCLLNNFYPREAKVQWKVDNALQSGNSQESVTEQDSKDSTYSLSSTLTLSKADYEKHKVYACEVTHQGLSSPVTKSFNRGEC

SEQ ID NO: 550 - protein, 214 aa, synthetic construct
DIQMTQSPSFLSASVGDRVTITCKASQNVGINVVWHQQKPGKAPKALIYSSSHRYSGVPSRFSGSGSGTEFTLTISSLQPEDFATYFCQQFKSYPNTFGQGTKLEIKRTVAAPSVFIFPPSDEQLKSGTASVVCLLNNFYPREAKVQWKVDNALQSGNSQESVTEQDSKDSTYSLSSTLTLSKADYEKHKVYACEVTHQGLSSPVTKSFNRGEC

SEQ ID NO: 551 - protein, 214 aa, synthetic construct
DIQMTQSPSFLSASVGDRVTITCKASQNVGINVVWHQQKPGKAPKALIYSSSHRYSGVPSRFSGSGSGTEFTLTISSLQPEDFATYFCQQFKSYPPTFGQGTKLEIKRTVAAPSVFIFPPSDEQLKSGTASVVCLLNNFYPREAKVQWKVDNALQSGNSQESVTEQDSKDSTYSLSSTLTLSKADYEKHKVYACEVTHQGLSSPVTKSFNRGEC

SEQ ID NO: 552 - protein, 214 aa, synthetic construct
DIQMTQSPSFLSASVGDRVTITCKASQNVGINVVWHQQKPGKAPKALIYSSSHRYSGVPSRFSGSGSGTEFTLTISSLQPEDFATYFCQQFKSYPQTFGQGTKLEIKRTVAAPSVFIFPPSDEQLKSGTASVVCLLNNFYPREAKVQWKVDNALQSGNSQESVTEQDSKDSTYSLSSTLTLSKADYEKHKVYACEVTHQGLSSPVTKSFNRGEC

SEQ ID NO: 553 - protein, 214 aa, synthetic construct
DIQMTQSPSFLSASVGDRVTITCKASQNVGINVVWHQQKPGKAPKALIYSSSHRYSGVPSRFSGSGSGTEFTLTISSLQPEDFATYFCQQFKSYPRTFGQGTKLEIKRTVAAPSVFIFPPSDEQLKSGTASVVCLLNNFYPREAKVQWKVDNALQSGNSQESVTEQDSKDSTYSLSSTLTLSKADYEKHKVYACEVTHQGLSSPVTKSFNRGEC

SEQ ID NO: 554 - protein, 214 aa, synthetic construct
DIQMTQSPSFLSASVGDRVTITCKASQNVGINVVWHQQKPGKAPKALIYSSSHRYSGVPSRFSGSGSGTEFTLTISSLQPEDFATYFCQQFKSYPSTFGQGTKLEIKRTVAAPSVFIFPPSDEQLKSGTASVVCLLNNFYPREAKVQWKVDNALQSGNSQESVTEQDSKDSTYSLSSTLTLSKADYEKHKVYACEVTHQGLSSPVTKSFNRGEC

SEQ ID NO: 555 - protein, 214 aa, synthetic construct
DIQMTQSPSFLSASVGDRVTITCKASQNVGINVVWHQQKPGKAPKALIYSSSHRYSGVPSRFSGSGSGTEFTLTISSLQPEDFATYFCQQFKSYPTTFGQGTKLEIKRTVAAPSVFIFPPSDEQLKSGTASVVCLLNNFYPREAKVQWKVDNALQSGNSQESVTEQDSKDSTYSLSSTLTLSKADYEKHKVYACEVTHQGLSSPVTKSFNRGEC

SEQ ID NO: 556 - protein, 214 aa, synthetic construct
DIQMTQSPSFLSASVGDRVTITCKASQNVGINVVWHQQKPGKAPKALIYSSSHRYSGVPSRFSGSGSGTEFTLTISSLQPEDFATYFCQQFKSYPVTFGQGTKLEIKRTVAAPSVFIFPPSDEQLKSGTASVVCLLNNFYPREAKVQWKVDNALQSGNSQESVTEQDSKDSTYSLSSTLTLSKADYEKHKVYACEVTHQGLSSPVTKSFNRGEC

SEQ ID NO: 557 - protein, 214 aa, synthetic construct
DIQMTQSPSFLSASVGDRVTITCKASQNVGINVVWHQQKPGKAPKALIYSSSHRYSGVPSRFSGSGSGTEFTLTISSLQPEDFATYFCQQFKSYPWTFGQGTKLEIKRTVAAPSVFIFPPSDEQLKSGTASVVCLLNNFYPREAKVQWKVDNALQSGNSQESVTEQDSKDSTYSLSSTLTLSKADYEKHKVYACEVTHQGLSSPVTKSFNRGEC

SEQ ID NO: 558 - protein, 214 aa, synthetic construct
DIQMTQSPSFLSASVGDRVTITCKASQNVGINVVWHQQKPGKAPKALIYSSSHRYSGVPSRFSGSGSGTEFTLTISSLQPEDFATYFCQQFKSYPYTFGQGTKLEIKRTVAAPSVFIFPPSDEQLKSGTASVVCLLNNFYPREAKVQWKVDNALQSGNSQESVTEQDSKDSTYSLSSTLTLSKADYEKHKVYACEVTHQGLSSPVTKSFNRGEC

SEQ ID NO: 559 - protein, 214 aa, synthetic construct
DIQMTQSPSFLSASVGDRVTITCKASQNVGINVVWHQQKPGKAPKALIYSSSHRYSGVPSRFSGSGSGTEFTLTISSLQPEDFATYFCQQFKSYPLAFGQGTKLEIKRTVAAPSVFIFPPSDEQLKSGTASVVCLLNNFYPREAKVQWKVDNALQSGNSQESVTEQDSKDSTYSLSSTLTLSKADYEKHKVYACEVTHQGLSSPVTKSFNRGEC

SEQ ID NO: 560 - protein, 214 aa, synthetic construct
DIQMTQSPSFLSASVGDRVTITCKASQNVGINVVWHQQKPGKAPKALIYSSSHRYSGVPSRFSGSGSGTEFTLTISSLQPEDFATYFCQQFKSYPLDFGQGTKLEIKRTVAAPSVFIFPPSDEQLKSGTASVVCLLNNFYPREAKVQWKVDNALQSGNSQESVTEQDSKDSTYSLSSTLTLSKADYEKHKVYACEVTHQGLSSPVTKSFNRGEC

SEQ ID NO: 561 - protein, 214 aa, synthetic construct
DIQMTQSPSFLSASVGDRVTITCKASQNVGINVVWHQQKPGKAPKALIYSSSHRYSGVPSRFSGSGSGTEFTLTISSLQPEDFATYFCQQFKSYPLEFGQGTKLEIKRTVAAPSVFIFPPSDEQLKSGTASVVCLLNNFYPREAKVQWKVDNALQSGNSQESVTEQDSKDSTYSLSSTLTLSKADYEKHKVYACEVTHQGLSSPVTKSFNRGEC

SEQ ID NO: 562 - protein, 214 aa, synthetic construct
DIQMTQSPSFLSASVGDRVTITCKASQNVGINVVWHQQKPGKAPKALIYSSSHRYSGVPSRFSGSGSGTEFTLTISSLQPEDFATYFCQQFKSYPLFFGQGTKLEIKRTVAAPSVFIFPPSDEQLKSGTASVVCLLNNFYPREAKVQWKVDNALQSGNSQESVTEQDSKDSTYSLSSTLTLSKADYEKHKVYACEVTHQGLSSPVTKSFNRGEC

SEQ ID NO: 563 - protein, 214 aa, synthetic construct
DIQMTQSPSFLSASVGDRVTITCKASQNVGINVVWHQQKPGKAPKALIYSSSHRYSGVPSRFSGSGSGTEFTLTISSLQPEDFATYFCQQFKSYPLGFGQGTKLEIKRTVAAPSVFIFPPSDEQLKSGTASVVCLLNNFYPREAKVQWKVDNALQSGNSQESVTEQDSKDSTYSLSSTLTLSKADYEKHKVYACEVTHQGLSSPVTKSFNRGEC

SEQ ID NO: 564 - protein, 214 aa, synthetic construct
DIQMTQSPSFLSASVGDRVTITCKASQNVGINVVWHQQKPGKAPKALIYSSSHRYSGVPSRFSGSGSGTEFTLTISSLQPEDFATYFCQQFKSYPLHFGQGTKLEIKRTVAAPSVFIFPPSDEQLKSGTASVVCLLNNFYPREAKVQWKVDNALQSGNSQESVTEQDSKDSTYSLSSTLTLSKADYEKHKVYACEVTHQGLSSPVTKSFNRGEC

SEQ ID NO: 565 - protein, 214 aa, synthetic construct
DIQMTQSPSFLSASVGDRVTITCKASQNVGINVVWHQQKPGKAPKALIYSSSHRYSGVPSRFSGSGSGTEFTLTISSLQPEDFATYFCQQFKSYPLIFGQGTKLEIKRTVAAPSVFIFPPSDEQLKSGTASVVCLLNNFYPREAKVQWKVDNALQSGNSQESVTEQDSKDSTYSLSSTLTLSKADYEKHKVYACEVTHQGLSSPVTKSFNRGEC

SEQ ID NO: 566 - protein, 214 aa, synthetic construct
DIQMTQSPSFLSASVGDRVTITCKASQNVGINVVWHQQKPGKAPKALIYSSSHRYSGVPSRFSGSGSGTEFTLTISSLQPEDFATYFCQQFKSYPLLFGQGTKLEIKRTVAAPSVFIFPPSDEQLKSGTASVVCLLNNFYPREAKVQWKVDNALQSGNSQESVTEQDSKDSTYSLSSTLTLSKADYEKHKVYACEVTHQGLSSPVTKSFNRGEC

SEQ ID NO: 567 - protein, 214 aa, synthetic construct
DIQMTQSPSFLSASVGDRVTITCKASQNVGINVVWHQQKPGKAPKALIYSSSHRYSGVPSRFSGSGSGTEFTLTISSLQPEDFATYFCQQFKSYPLMFGQGTKLEIKRTVAAPSVFIFPPSDEQLKSGTASVVCLLNNFYPREAKVQWKVDNALQSGNSQESVTEQDSKDSTYSLSSTLTLSKADYEKHKVYACEVTHQGLSSPVTKSFNRGEC

SEQ ID NO: 568 - protein, 214 aa, synthetic construct
DIQMTQSPSFLSASVGDRVTITCKASQNVGINVVWHQQKPGKAPKALIYSSSHRYSGVPSRFSGSGSGTEFTLTISSLQPEDFATYFCQQFKSYPLNFGQGTKLEIKRTVAAPSVFIFPPSDEQLKSGTASVVCLLNNFYPREAKVQWKVDNALQSGNSQESVTEQDSKDSTYSLSSTLTLSKADYEKHKVYACEVTHQGLSSPVTKSFNRGEC

SEQ ID NO: 569 - protein, 214 aa, synthetic construct
DIQMTQSPSFLSASVGDRVTITCKASQNVGINVVWHQQKPGKAPKALIYSSSHRYSGVPSRFSGSGSGTEFTLTISSLQPEDFATYFCQQFKSYPLPFGQGTKLEIKRTVAAPSVFIFPPSDEQLKSGTASVVCLLNNFYPREAKVQWKVDNALQSGNSQESVTEQDSKDSTYSLSSTLTLSKADYEKHKVYACEVTHQGLSSPVTKSFNRGEC

SEQ ID NO: 570 - protein, 214 aa, synthetic construct
DIQMTQSPSFLSASVGDRVTITCKASQNVGINVVWHQQKPGKAPKALIYSSSHRYSGVPSRFSGSGSGTEFTLTISSLQPEDFATYFCQQFKSYPLQFGQGTKLEIKRTVAAPSVFIFPPSDEQLKSGTASVVCLLNNFYPREAKVQWKVDNALQSGNSQESVTEQDSKDSTYSLSSTLTLSKADYEKHKVYACEVTHQGLSSPVTKSFNRGEC

SEQ ID NO: 571 - protein, 214 aa, synthetic construct
DIQMTQSPSFLSASVGDRVTITCKASQNVGINVVWHQQKPGKAPKALIYSSSHRYSGVPSRFSGSGSGTEFTLTISSLQPEDFATYFCQQFKSYPLRFGQGTKLEIKRTVAAPSVFIFPPSDEQLKSGTASVVCLLNNFYPREAKVQWKVDNALQSGNSQESVTEQDSKDSTYSLSSTLTLSKADYEKHKVYACEVTHQGLSSPVTKSFNRGEC

SEQ ID NO: 572 - protein, 214 aa, synthetic construct
DIQMTQSPSFLSASVGDRVTITCKASQNVGINVVWHQQKPGKAPKALIYSSSHRYSGVPSRFSGSGSGTEFTLTISSLQPEDFATYFCQQFKSYPLSFGQGTKLEIKRTVAAPSVFIFPPSDEQLKSGTASVVCLLNNFYPREAKVQWKVDNALQSGNSQESVTEQDSKDSTYSLSSTLTLSKADYEKHKVYACEVTHQGLSSPVTKSFNRGEC

SEQ ID NO: 573 - protein, 214 aa, synthetic construct
DIQMTQSPSFLSASVGDRVTITCKASQNVGINVVWHQQKPGKAPKALIYSSSHRYSGVPSRFSGSGSGTEFTLTISSLQPEDFATYFCQQFKSYPLVFGQGTKLEIKRTVAAPSVFIFPPSDEQLKSGTASVVCLLNNFYPREAKVQWKVDNALQSGNSQESVTEQDSKDSTYSLSSTLTLSKADYEKHKVYACEVTHQGLSSPVTKSFNRGEC

SEQ ID NO: 574 - protein, 214 aa, synthetic construct
DIQMTQSPSFLSASVGDRVTITCKASQNVGINVVWHQQKPGKAPKALIYSSSHRYSGVPSRFSGSGSGTEFTLTISSLQPEDFATYFCQQFKSYPLWFGQGTKLEIKRTVAAPSVFIFPPSDEQLKSGTASVVCLLNNFYPREAKVQWKVDNALQSGNSQESVTEQDSKDSTYSLSSTLTLSKADYEKHKVYACEVTHQGLSSPVTKSFNRGEC

SEQ ID NO: 575 - protein, 222 aa, synthetic construct
QVQLVQSGAEVKKPGSSVKVSCKASGHDFRLTYIHWVRQAPGQGLEWMGRVSAGSGNVKYNEKFKGRVTITADTSTSTAYMELSSLRSEDTAVYYCAVSYYSYDVLDYWGQGTTVTVSSASTKGPSVFPLAPSSKSTSGGTAALGCLVKDYFPEPVTVSWNSGALTSGVHTFPAVLQSSGLYSLSSVVTVPSSSLGTQTYICNVNHKPSNTKVDKKVEPKSC

SEQ ID NO: 576 - protein, 222 aa, synthetic construct
QVQLVQSGAEVKKPGSSVKVSCKASGYSFTTYYIHWVRQAPGQGLEWMGWFFPGSGNIKYNEKFKGRVTITADTSTSTAYMELSSLRSEDTAVYYCAGSYYSYDVLDYWGQGTTVTVSSASTKGPSVFPLAPSSKSTSGGTAALGCLVKDYFPEPVTVSWNSGALTSGVHTFPAVLQSSGLYSLSSVVTVPSSSLGTQTYICNVNHKPSNTKVDKKVEPKSC

SEQ ID NO: 577 - protein, 222 aa, synthetic construct
QVQLVQSGAEVKKPGASVKVSCKASGYSFTTYYIHWVRQAPGQGLEWMGWFFPGSGNIKYNEKFKGRVTITADTSTSTAYMELSSLRSEDTAVYYCAGSYYSYDVLDYWGQGTLVTVSSASTKGPSVFPLAPSSKSTSGGTAALGCLVKDYFPEPVTVSWNSGALTSGVHTFPAVLQSSGLYSLSSVVTVPSSSLGTQTYICNVNHKPSNTKVDKKVEPKSC

SEQ ID NO: 578 - protein, 222 aa, synthetic construct
QVQLVQSGAEVKKPGASVKVSCKASGYSFTTYYIHWVRQAPGQGLEWMGWIFPGSGNIKYNEKFKGRVTITADTSTSTAYMELSSLRSEDTAVYYCAGSYYSYDVLDYWGQGTLVTVSSASTKGPSVFPLAPSSKSTSGGTAALGCLVKDYFPEPVTVSWNSGALTSGVHTFPAVLQSSGLYSLSSVVTVPSSSLGTQTYICNVNHKPSNTKVDKKVEPKSC

SEQ ID NO: 579 - protein, 222 aa, synthetic construct
QVQLVQSGAEVKKPGASVKVSCKASGYSFTTYYIHWVRQAPGQGLEWMGWIYPGSGNIKYNEKFKGRVTITADTSTSTAYMELSSLRSEDTAVYYCAGSYYSYDVLDYWGQGTLVTVSSASTKGPSVFPLAPSSKSTSGGTAALGCLVKDYFPEPVTVSWNSGALTSGVHTFPAVLQSSGLYSLSSVVTVPSSSLGTQTYICNVNHKPSNTKVDKKVEPKSC

SEQ ID NO: 580 - protein, 222 aa, synthetic construct
QVQLVQSGAEVKKPGASVKVSCKASGYSFTTYYIHWVRQAPGQGLEWMGWIYPGSGNIKYNEKFKGRVTITADTSTSTAYMELSSLRSEDTAVYYCARSYYSYDVLDYWGQGTLVTVSSASTKGPSVFPLAPSSKSTSGGTAALGCLVKDYFPEPVTVSWNSGALTSGVHTFPAVLQSSGLYSLSSVVTVPSSSLGTQTYICNVNHKPSNTKVDKKVEPKSC

SEQ ID NO: 581 - protein, 222 aa, synthetic construct
QVQLVQSGAEVKKPGSSVKVSCKASGYSFRLTYIHWVRQAPGQGLEWMGWFFPGSGNIKYNEKFKGRVTITADTSTSTAYMELSSLRSEDTAVYYCAGSYYSYDVLDYWGQGTTVTVSSASTKGPSVFPLAPSSKSTSGGTAALGCLVKDYFPEPVTVSWNSGALTSGVHTFPAVLQSSGLYSLSSVVTVPSSSLGTQTYICNVNHKPSNTKVDKKVEPKSC

SEQ ID NO: 582 - protein, 222 aa, synthetic construct
QVQLVQSGAEVKKPGSSVKVSCKASGYSFTLYYIHWVRQAPGQGLEWMGWFFPGSGNIKYNEKFKGRVTITADTSTSTAYMELSSLRSEDTAVYYCAASYYSFDVLDYWGQGTTVTVSSASTKGPSVFPLAPSSKSTSGGTAALGCLVKDYFPEPVTVSWNSGALTSGVHTFPAVLQSSGLYSLSSVVTVPSSSLGTQTYICNVNHKPSNTKVDKKVEPKSC

SEQ ID NO: 583 - protein, 222 aa, synthetic construct
QVQLVQSGAEVKKPGSSVKVSCKASGYSFTTYYIHWVRQAPGQGLEWMGWFFPRSGNIKYNEKFKGRVTITADTSTSTAYMELSSLRSEDTAVYYCAASYYSFDVLDYWGQGTTVTVSSASTKGPSVFPLAPSSKSTSGGTAALGCLVKDYFPEPVTVSWNSGALTSGVHTFPAVLQSSGLYSLSSVVTVPSSSLGTQTYICNVNHKPSNTKVDKKVEPKSC

SEQ ID NO: 584 - protein, 222 aa, synthetic construct
QVQLVQSGAEVKKPGSSVKVSCKASGYSFTTYYIHWVRQAPGQGLEWMGWFFPGSGNIKYNEKFKGRVTITADTSTSTAYMELSSLRSEDTAVYYCAASYYSFDVLDYWGQGTTVTVSSASTKGPSVFPLAPSSKSTSGGTAALGCLVKDYFPEPVTVSWNSGALTSGVHTFPAVLQSSGLYSLSSVVTVPSSSLGTQTYICNVNHKPSNTKVDKKVEPKSC

SEQ ID NO: 585 - protein, 222 aa, synthetic construct
QVQLVQSGAEVKKPGSSVKVSCKASGYSFTLWYIHWVRQAPGQGLEWMGWFFPGSGNIKYNEKFKGRVTITADTSTSTAYMELSSLRSEDTAVYYCAASYYSFDVLDYWGQGTTVTVSSASTKGPSVFPLAPSSKSTSGGTAALGCLVKDYFPEPVTVSWNSGALTSGVHTFPAVLQSSGLYSLSSVVTVPSSSLGTQTYICNVNHKPSNTKVDKKVEPKSC

SEQ ID NO: 586 - protein, 222 aa, synthetic construct
QVQLVQSGAEVKKPGSSVKVSCKASGYSFTLWYIHWVRQAPGQGLEWMGWFFPRSGNIKYNEKFKGRVTITADTSTSTAYMELSSLRSEDTAVYYCAASYYSFDVLDYWGQGTTVTVSSASTKGPSVFPLAPSSKSTSGGTAALGCLVKDYFPEPVTVSWNSGALTSGVHTFPAVLQSSGLYSLSSVVTVPSSSLGTQTYICNVNHKPSNTKVDKKVEPKSC

SEQ ID NO: 587 - protein, 222 aa, synthetic construct
QVQLVQSGAEVKKPGSSVKVSCKASGYSFTLYYIHWVRQAPGQGLEWMGWFFPRSGNIKYNEKFKGRVTITADTSTSTAYMELSSLRSEDTAVYYCAASYYSFDVLDYWGQGTTVTVSSASTKGPSVFPLAPSSKSTSGGTAALGCLVKDYFPEPVTVSWNSGALTSGVHTFPAVLQSSGLYSLSSVVTVPSSSLGTQTYICNVNHKPSNTKVDKKVEPKSC

SEQ ID NO: 588 - protein, 222 aa, synthetic construct
QVQLVQSGAEVKKPGSSVKVSCKASGYSFTTYYIHWVRQAPGQGLEWMGWFFPRSGNIKYNEKFKGRVTITADTSTSTAYMELSSLRSEDTAVYYCAGSYYSFDVLDYWGQGTTVTVSSASTKGPSVFPLAPSSKSTSGGTAALGCLVKDYFPEPVTVSWNSGALTSGVHTFPAVLQSSGLYSLSSVVTVPSSSLGTQTYICNVNHKPSNTKVDKKVEPKSC

SEQ ID NO: 589 - protein, 222 aa, synthetic construct
QVQLVQSGAEVKKPGSSVKVSCKASGYSFTLYYIHWVRQAPGQGLEWMGWFFPRSGNIKYNEKFKGRVTITADTSTSTAYMELSSLRSEDTAVYYCAGSYYSFDVLDYWGQGTTVTVSSASTKGPSVFPLAPSSKSTSGGTAALGCLVKDYFPEPVTVSWNSGALTSGVHTFPAVLQSSGLYSLSSVVTVPSSSLGTQTYICNVNHKPSNTKVDKKVEPKSC

SEQ ID NO: 590 - protein, 222 aa, synthetic construct
QVQLVQSGAEVKKPGSSVKVSCKASGYSFTTWYIHWVRQAPGQGLEWMGWFFPGSGNIKYNEKFKGRVTITADTSTSTAYMELSSLRSEDTAVYYCAGSYYSFDVLDYWGQGTTVTVSSASTKGPSVFPLAPSSKSTSGGTAALGCLVKDYFPEPVTVSWNSGALTSGVHTFPAVLQSSGLYSLSSVVTVPSSSLGTQTYICNVNHKPSNTKVDKKVEPKSC

SEQ ID NO: 591 - protein, 222 aa, synthetic construct
QVQLVQSGAEVKKPGSSVKVSCKASGYSFTLWYIHWVRQAPGQGLEWMGWFFPGSGNIKYNEKFKGRVTITADTSTSTAYMELSSLRSEDTAVYYCAGSYYSFDVLDYWGQGTTVTVSSASTKGPSVFPLAPSSKSTSGGTAALGCLVKDYFPEPVTVSWNSGALTSGVHTFPAVLQSSGLYSLSSVVTVPSSSLGTQTYICNVNHKPSNTKVDKKVEPKSC

SEQ ID NO: 592 - protein, 222 aa, synthetic construct
QVQLVQSGAEVKKPGSSVKVSCKASGYSFTLYYIHWVRQAPGQGLEWMGWFFPGSGNIKYNEKFKGRVTITADTSTSTAYMELSSLRSEDTAVYYCAGSYYSFDVLDYWGQGTTVTVSSASTKGPSVFPLAPSSKSTSGGTAALGCLVKDYFPEPVTVSWNSGALTSGVHTFPAVLQSSGLYSLSSVVTVPSSSLGTQTYICNVNHKPSNTKVDKKVEPKSC

SEQ ID NO: 593 - protein, 222 aa, synthetic construct
QVQLVQSGAEVKKPGSSVKVSCKASGYSFTLWYIHWVRQAPGQGLEWMGWFFPRSGNIKYNEKFKGRVTITADTSTSTAYMELSSLRSEDTAVYYCAGSYYSFDVLDYWGQGTTVTVSSASTKGPSVFPLAPSSKSTSGGTAALGCLVKDYFPEPVTVSWNSGALTSGVHTFPAVLQSSGLYSLSSVVTVPSSSLGTQTYICNVNHKPSNTKVDKKVEPKSC

SEQ ID NO: 594 - protein, 222 aa, synthetic construct
QVQLVQSGAEVKKPGSSVKVSCKASGDSFTTYYIHWVRQAPGQGLEWMGWFFPGSGNIKYNEKFKGRVTITADTSTSTAYMELSSLRSEDTAVYYCAGSYYSYDVLDYWGQGTTVTVSSASTKGPSVFPLAPSSKSTSGGTAALGCLVKDYFPEPVTVSWNSGALTSGVHTFPAVLQSSGLYSLSSVVTVPSSSLGTQTYICNVNHKPSNTKVDKKVEPKSC

SEQ ID NO: 595 - protein, 222 aa, synthetic construct
QVQLVQSGAEVKKPGSSVKVSCKASGESFTTYYIHWVRQAPGQGLEWMGWFFPGSGNIKYNEKFKGRVTITADTSTSTAYMELSSLRSEDTAVYYCAGSYYSYDVLDYWGQGTTVTVSSASTKGPSVFPLAPSSKSTSGGTAALGCLVKDYFPEPVTVSWNSGALTSGVHTFPAVLQSSGLYSLSSVVTVPSSSLGTQTYICNVNHKPSNTKVDKKVEPKSC

SEQ ID NO: 596 - protein, 222 aa, synthetic construct
QVQLVQSGAEVKKPGSSVKVSCKASGFSFTTYYIHWVRQAPGQGLEWMGWFFPGSGNIKYNEKFKGRVTITADTSTSTAYMELSSLRSEDTAVYYCAGSYYSYDVLDYWGQGTTVTVSSASTKGPSVFPLAPSSKSTSGGTAALGCLVKDYFPEPVTVSWNSGALTSGVHTFPAVLQSSGLYSLSSVVTVPSSSLGTQTYICNVNHKPSNTKVDKKVEPKSC

SEQ ID NO: 597 - protein, 222 aa, synthetic construct
QVQLVQSGAEVKKPGSSVKVSCKASGGSFTTYYIHWVRQAPGQGLEWMGWFFPGSGNIKYNEKFKGRVTITADTSTSTAYMELSSLRSEDTAVYYCAGSYYSYDVLDYWGQGTTVTVSSASTKGPSVFPLAPSSKSTSGGTAALGCLVKDYFPEPVTVSWNSGALTSGVHTFPAVLQSSGLYSLSSVVTVPSSSLGTQTYICNVNHKPSNTKVDKKVEPKSC

SEQ ID NO: 598 - protein, 222 aa, synthetic construct
QVQLVQSGAEVKKPGSSVKVSCKASGHSFTTYYIHWVRQAPGQGLEWMGWFFPGSGNIKYNEKFKGRVTITADTSTSTAYMELSSLRSEDTAVYYCAGSYYSYDVLDYWGQGTTVTVSSASTKGPSVFPLAPSSKSTSGGTAALGCLVKDYFPEPVTVSWNSGALTSGVHTFPAVLQSSGLYSLSSVVTVPSSSLGTQTYICNVNHKPSNTKVDKKVEPKSC

SEQ ID NO: 599 - protein, 222 aa, synthetic construct
QVQLVQSGAEVKKPGSSVKVSCKASGISFTTYYIHWVRQAPGQGLEWMGWFFPGSGNIKYNEKFKGRVTITADTSTSTAYMELSSLRSEDTAVYYCAGSYYSYDVLDYWGQGTTVTVSSASTKGPSVFPLAPSSKSTSGGTAALGCLVKDYFPEPVTVSWNSGALTSGVHTFPAVLQSSGLYSLSSVVTVPSSSLGTQTYICNVNHKPSNTKVDKKVEPKSC

SEQ ID NO: 600 - protein, 222 aa, synthetic construct
QVQLVQSGAEVKKPGSSVKVSCKASGKSFTTYYIHWVRQAPGQGLEWMGWFFPGSGNIKYNEKFKGRVTITADTSTSTAYMELSSLRSEDTAVYYCAGSYYSYDVLDYWGQGTTVTVSSASTKGPSVFPLAPSSKSTSGGTAALGCLVKDYFPEPVTVSWNSGALTSGVHTFPAVLQSSGLYSLSSVVTVPSSSLGTQTYICNVNHKPSNTKVDKKVEPKSC

SEQ ID NO: 601 - protein, 222 aa, synthetic construct
QVQLVQSGAEVKKPGSSVKVSCKASGLSFTTYYIHWVRQAPGQGLEWMGWFFPGSGNIKYNEKFKGRVTITADTSTSTAYMELSSLRSEDTAVYYCAGSYYSYDVLDYWGQGTTVTVSSASTKGPSVFPLAPSSKSTSGGTAALGCLVKDYFPEPVTVSWNSGALTSGVHTFPAVLQSSGLYSLSSVVTVPSSSLGTQTYICNVNHKPSNTKVDKKVEPKSC

SEQ ID NO: 602 - protein, 222 aa, synthetic construct
QVQLVQSGAEVKKPGSSVKVSCKASGMSFTTYYIHWVRQAPGQGLEWMGWFFPGSGNIKYNEKFKGRVTITADTSTSTAYMELSSLRSEDTAVYYCAGSYYSYDVLDYWGQGTTVTVSSASTKGPSVFPLAPSSKSTSGGTAALGCLVKDYFPEPVTVSWNSGALTSGVHTFPAVLQSSGLYSLSSVVTVPSSSLGTQTYICNVNHKPSNTKVDKKVEPKSC

SEQ ID NO: 603 - protein, 222 aa, synthetic construct
QVQLVQSGAEVKKPGSSVKVSCKASGNSFTTYYIHWVRQAPGQGLEWMGWFFPGSGNIKYNEKFKGRVTITADTSTSTAYMELSSLRSEDTAVYYCAGSYYSYDVLDYWGQGTTVTVSSASTKGPSVFPLAPSSKSTSGGTAALGCLVKDYFPEPVTVSWNSGALTSGVHTFPAVLQSSGLYSLSSVVTVPSSSLGTQTYICNVNHKPSNTKVDKKVEPKSC

SEQ ID NO: 604 - protein, 222 aa, synthetic construct
QVQLVQSGAEVKKPGSSVKVSCKASGPSFTTYYIHWVRQAPGQGLEWMGWFFPGSGNIKYNEKFKGRVTITADTSTSTAYMELSSLRSEDTAVYYCAGSYYSYDVLDYWGQGTTVTVSSASTKGPSVFPLAPSSKSTSGGTAALGCLVKDYFPEPVTVSWNSGALTSGVHTFPAVLQSSGLYSLSSVVTVPSSSLGTQTYICNVNHKPSNTKVDKKVEPKSC

SEQ ID NO: 605 - protein, 222 aa, synthetic construct
QVQLVQSGAEVKKPGSSVKVSCKASGQSFTTYYIHWVRQAPGQGLEWMGWFFPGSGNIKYNEKFKGRVTITADTSTSTAYMELSSLRSEDTAVYYCAGSYYSYDVLDYWGQGTTVTVSSASTKGPSVFPLAPSSKSTSGGTAALGCLVKDYFPEPVTVSWNSGALTSGVHTFPAVLQSSGLYSLSSVVTVPSSSLGTQTYICNVNHKPSNTKVDKKVEPKSC

SEQ ID NO: 606 - protein, 222 aa, synthetic construct
QVQLVQSGAEVKKPGSSVKVSCKASGRSFTTYYIHWVRQAPGQGLEWMGWFFPGSGNIKYNEKFKGRVTITADTSTSTAYMELSSLRSEDTAVYYCAGSYYSYDVLDYWGQGTTVTVSSASTKGPSVFPLAPSSKSTSGGTAALGCLVKDYFPEPVTVSWNSGALTSGVHTFPAVLQSSGLYSLSSVVTVPSSSLGTQTYICNVNHKPSNTKVDKKVEPKSC

SEQ ID NO: 607 - protein, 222 aa, synthetic construct
QVQLVQSGAEVKKPGSSVKVSCKASGSSFTTYYIHWVRQAPGQGLEWMGWFFPGSGNIKYNEKFKGRVTITADTSTSTAYMELSSLRSEDTAVYYCAGSYYSYDVLDYWGQGTTVTVSSASTKGPSVFPLAPSSKSTSGGTAALGCLVKDYFPEPVTVSWNSGALTSGVHTFPAVLQSSGLYSLSSVVTVPSSSLGTQTYICNVNHKPSNTKVDKKVEPKSC

SEQ ID NO: 608 - protein, 222 aa, synthetic construct
QVQLVQSGAEVKKPGSSVKVSCKASGTSFTTYYIHWVRQAPGQGLEWMGWFFPGSGNIKYNEKFKGRVTITADTSTSTAYMELSSLRSEDTAVYYCAGSYYSYDVLDYWGQGTTVTVSSASTKGPSVFPLAPSSKSTSGGTAALGCLVKDYFPEPVTVSWNSGALTSGVHTFPAVLQSSGLYSLSSVVTVPSSSLGTQTYICNVNHKPSNTKVDKKVEPKSC

SEQ ID NO: 609 - protein, 222 aa, synthetic construct
QVQLVQSGAEVKKPGSSVKVSCKASGVSFTTYYIHWVRQAPGQGLEWMGWFFPGSGNIKYNEKFKGRVTITADTSTSTAYMELSSLRSEDTAVYYCAGSYYSYDVLDYWGQGTTVTVSSASTKGPSVFPLAPSSKSTSGGTAALGCLVKDYFPEPVTVSWNSGALTSGVHTFPAVLQSSGLYSLSSVVTVPSSSLGTQTYICNVNHKPSNTKVDKKVEPKSC

SEQ ID NO: 610 - protein, 222 aa, synthetic construct
QVQLVQSGAEVKKPGSSVKVSCKASGWSFTTYYIHWVRQAPGQGLEWMGWFFPGSGNIKYNEKFKGRVTITADTSTSTAYMELSSLRSEDTAVYYCAGSYYSYDVLDYWGQGTTVTVSSASTKGPSVFPLAPSSKSTSGGTAALGCLVKDYFPEPVTVSWNSGALTSGVHTFPAVLQSSGLYSLSSVVTVPSSSLGTQTYICNVNHKPSNTKVDKKVEPKSC

SEQ ID NO: 611 - protein, 222 aa, synthetic construct
QVQLVQSGAEVKKPGSSVKVSCKASGYAFTTYYIHWVRQAPGQGLEWMGWFFPGSGNIKYNEKFKGRVTITADTSTSTAYMELSSLRSEDTAVYYCAGSYYSYDVLDYWGQGTTVTVSSASTKGPSVFPLAPSSKSTSGGTAALGCLVKDYFPEPVTVSWNSGALTSGVHTFPAVLQSSGLYSLSSVVTVPSSSLGTQTYICNVNHKPSNTKVDKKVEPKSC

SEQ ID NO: 612 - protein, 222 aa, synthetic construct
QVQLVQSGAEVKKPGSSVKVSCKASGYEFTTYYIHWVRQAPGQGLEWMGWFFPGSGNIKYNEKFKGRVTITADTSTSTAYMELSSLRSEDTAVYYCAGSYYSYDVLDYWGQGTTVTVSSASTKGPSVFPLAPSSKSTSGGTAALGCLVKDYFPEPVTVSWNSGALTSGVHTFPAVLQSSGLYSLSSVVTVPSSSLGTQTYICNVNHKPSNTKVDKKVEPKSC

SEQ ID NO: 613 - protein, 222 aa, synthetic construct
QVQLVQSGAEVKKPGSSVKVSCKASGYGFTTYYIHWVRQAPGQGLEWMGWFFPGSGNIKYNEKFKGRVTITADTSTSTAYMELSSLRSEDTAVYYCAGSYYSYDVLDYWGQGTTVTVSSASTKGPSVFPLAPSSKSTSGGTAALGCLVKDYFPEPVTVSWNSGALTSGVHTFPAVLQSSGLYSLSSVVTVPSSSLGTQTYICNVNHKPSNTKVDKKVEPKSC

SEQ ID NO: 614 - protein, 222 aa, synthetic construct
QVQLVQSGAEVKKPGSSVKVSCKASGYHFTTYYIHWVRQAPGQGLEWMGWFFPGSGNIKYNEKFKGRVTITADTSTSTAYMELSSLRSEDTAVYYCAGSYYSYDVLDYWGQGTTVTVSSASTKGPSVFPLAPSSKSTSGGTAALGCLVKDYFPEPVTVSWNSGALTSGVHTFPAVLQSSGLYSLSSVVTVPSSSLGTQTYICNVNHKPSNTKVDKKVEPKSC

SEQ ID NO: 615 - protein, 222 aa, synthetic construct
QVQLVQSGAEVKKPGSSVKVSCKASGYIFTTYYIHWVRQAPGQGLEWMGWFFPGSGNIKYNEKFKGRVTITADTSTSTAYMELSSLRSEDTAVYYCAGSYYSYDVLDYWGQGTTVTVSSASTKGPSVFPLAPSSKSTSGGTAALGCLVKDYFPEPVTVSWNSGALTSGVHTFPAVLQSSGLYSLSSVVTVPSSSLGTQTYICNVNHKPSNTKVDKKVEPKSC

SEQ ID NO: 616 - protein, 222 aa, synthetic construct
QVQLVQSGAEVKKPGSSVKVSCKASGYKFTTYYIHWVRQAPGQGLEWMGWFFPGSGNIKYNEKFKGRVTITADTSTSTAYMELSSLRSEDTAVYYCAGSYYSYDVLDYWGQGTTVTVSSASTKGPSVFPLAPSSKSTSGGTAALGCLVKDYFPEPVTVSWNSGALTSGVHTFPAVLQSSGLYSLSSVVTVPSSSLGTQTYICNVNHKPSNTKVDKKVEPKSC

SEQ ID NO: 617 - protein, 222 aa, synthetic construct
QVQLVQSGAEVKKPGSSVKVSCKASGYLFTTYYIHWVRQAPGQGLEWMGWFFPGSGNIKYNEKFKGRVTITADTSTSTAYMELSSLRSEDTAVYYCAGSYYSYDVLDYWGQGTTVTVSSASTKGPSVFPLAPSSKSTSGGTAALGCLVKDYFPEPVTVSWNSGALTSGVHTFPAVLQSSGLYSLSSVVTVPSSSLGTQTYICNVNHKPSNTKVDKKVEPKSC

SEQ ID NO: 618 - protein, 222 aa, synthetic construct
QVQLVQSGAEVKKPGSSVKVSCKASGYMFTTYYIHWVRQAPGQGLEWMGWFFPGSGNIKYNEKFKGRVTITADTSTSTAYMELSSLRSEDTAVYYCAGSYYSYDVLDYWGQGTTVTVSSASTKGPSVFPLAPSSKSTSGGTAALGCLVKDYFPEPVTVSWNSGALTSGVHTFPAVLQSSGLYSLSSVVTVPSSSLGTQTYICNVNHKPSNTKVDKKVEPKSC

SEQ ID NO: 619 - protein, 222 aa, synthetic construct
QVQLVQSGAEVKKPGSSVKVSCKASGYNFTTYYIHWVRQAPGQGLEWMGWFFPGSGNIKYNEKFKGRVTITADTSTSTAYMELSSLRSEDTAVYYCAGSYYSYDVLDYWGQGTTVTVSSASTKGPSVFPLAPSSKSTSGGTAALGCLVKDYFPEPVTVSWNSGALTSGVHTFPAVLQSSGLYSLSSVVTVPSSSLGTQTYICNVNHKPSNTKVDKKVEPKSC

SEQ ID NO: 620 - protein, 222 aa, synthetic construct
QVQLVQSGAEVKKPGSSVKVSCKASGYPFTTYYIHWVRQAPGQGLEWMGWFFPGSGNIKYNEKFKGRVTITADTSTSTAYMELSSLRSEDTAVYYCAGSYYSYDVLDYWGQGTTVTVSSASTKGPSVFPLAPSSKSTSGGTAALGCLVKDYFPEPVTVSWNSGALTSGVHTFPAVLQSSGLYSLSSVVTVPSSSLGTQTYICNVNHKPSNTKVDKKVEPKSC

SEQ ID NO: 621 - protein, 222 aa, synthetic construct
QVQLVQSGAEVKKPGSSVKVSCKASGYQFTTYYIHWVRQAPGQGLEWMGWFFPGSGNIKYNEKFKGRVTITADTSTSTAYMELSSLRSEDTAVYYCAGSYYSYDVLDYWGQGTTVTVSSASTKGPSVFPLAPSSKSTSGGTAALGCLVKDYFPEPVTVSWNSGALTSGVHTFPAVLQSSGLYSLSSVVTVPSSSLGTQTYICNVNHKPSNTKVDKKVEPKSC

SEQ ID NO: 622 - protein, 222 aa, synthetic construct
QVQLVQSGAEVKKPGSSVKVSCKASGYTFTTYYIHWVRQAPGQGLEWMGWFFPGSGNIKYNEKFKGRVTITADTSTSTAYMELSSLRSEDTAVYYCAGSYYSYDVLDYWGQGTTVTVSSASTKGPSVFPLAPSSKSTSGGTAALGCLVKDYFPEPVTVSWNSGALTSGVHTFPAVLQSSGLYSLSSVVTVPSSSLGTQTYICNVNHKPSNTKVDKKVEPKSC

SEQ ID NO: 623 - protein, 222 aa, synthetic construct
QVQLVQSGAEVKKPGSSVKVSCKASGYVFTTYYIHWVRQAPGQGLEWMGWFFPGSGNIKYNEKFKGRVTITADTSTSTAYMELSSLRSEDTAVYYCAGSYYSYDVLDYWGQGTTVTVSSASTKGPSVFPLAPSSKSTSGGTAALGCLVKDYFPEPVTVSWNSGALTSGVHTFPAVLQSSGLYSLSSVVTVPSSSLGTQTYICNVNHKPSNTKVDKKVEPKSC

SEQ ID NO: 624 - protein, 222 aa, synthetic construct
QVQLVQSGAEVKKPGSSVKVSCKASGYWFTTYYIHWVRQAPGQGLEWMGWFFPGSGNIKYNEKFKGRVTITADTSTSTAYMELSSLRSEDTAVYYCAGSYYSYDVLDYWGQGTTVTVSSASTKGPSVFPLAPSSKSTSGGTAALGCLVKDYFPEPVTVSWNSGALTSGVHTFPAVLQSSGLYSLSSVVTVPSSSLGTQTYICNVNHKPSNTKVDKKVEPKSC

SEQ ID NO: 625 - protein, 222 aa, synthetic construct
QVQLVQSGAEVKKPGSSVKVSCKASGYYFTTYYIHWVRQAPGQGLEWMGWFFPGSGNIKYNEKFKGRVTITADTSTSTAYMELSSLRSEDTAVYYCAGSYYSYDVLDYWGQGTTVTVSSASTKGPSVFPLAPSSKSTSGGTAALGCLVKDYFPEPVTVSWNSGALTSGVHTFPAVLQSSGLYSLSSVVTVPSSSLGTQTYICNVNHKPSNTKVDKKVEPKSC

SEQ ID NO: 626 - protein, 222 aa, synthetic construct
QVQLVQSGAEVKKPGSSVKVSCKASGYSATTYYIHWVRQAPGQGLEWMGWFFPGSGNIKYNEKFKGRVTITADTSTSTAYMELSSLRSEDTAVYYCAGSYYSYDVLDYWGQGTTVTVSSASTKGPSVFPLAPSSKSTSGGTAALGCLVKDYFPEPVTVSWNSGALTSGVHTFPAVLQSSGLYSLSSVVTVPSSSLGTQTYICNVNHKPSNTKVDKKVEPKSC

SEQ ID NO: 627 - protein, 222 aa, synthetic construct
QVQLVQSGAEVKKPGSSVKVSCKASGYSDTTYYIHWVRQAPGQGLEWMGWFFPGSGNIKYNEKFKGRVTITADTSTSTAYMELSSLRSEDTAVYYCAGSYYSYDVLDYWGQGTTVTVSSASTKGPSVFPLAPSSKSTSGGTAALGCLVKDYFPEPVTVSWNSGALTSGVHTFPAVLQSSGLYSLSSVVTVPSSSLGTQTYICNVNHKPSNTKVDKKVEPKSC

SEQ ID NO: 628 - protein, 222 aa, synthetic construct
QVQLVQSGAEVKKPGSSVKVSCKASGYSETTYYIHWVRQAPGQGLEWMGWFFPGSGNIKYNEKFKGRVTITADTSTSTAYMELSSLRSEDTAVYYCAGSYYSYDVLDYWGQGTTVTVSSASTKGPSVFPLAPSSKSTSGGTAALGCLVKDYFPEPVTVSWNSGALTSGVHTFPAVLQSSGLYSLSSVVTVPSSSLGTQTYICNVNHKPSNTKVDKKVEPKSC

SEQ ID NO: 629 - protein, 222 aa, synthetic construct
QVQLVQSGAEVKKPGSSVKVSCKASGYSGTTYYIHWVRQAPGQGLEWMGWFFPGSGNIKYNEKFKGRVTITADTSTSTAYMELSSLRSEDTAVYYCAGSYYSYDVLDYWGQGTTVTVSSASTKGPSVFPLAPSSKSTSGGTAALGCLVKDYFPEPVTVSWNSGALTSGVHTFPAVLQSSGLYSLSSVVTVPSSSLGTQTYICNVNHKPSNTKVDKKVEPKSC

SEQ ID NO: 630 - protein, 222 aa, synthetic construct
QVQLVQSGAEVKKPGSSVKVSCKASGYSHTTYYIHWVRQAPGQGLEWMGWFFPGSGNIKYNEKFKGRVTITADTSTSTAYMELSSLRSEDTAVYYCAGSYYSYDVLDYWGQGTTVTVSSASTKGPSVFPLAPSSKSTSGGTAALGCLVKDYFPEPVTVSWNSGALTSGVHTFPAVLQSSGLYSLSSVVTVPSSSLGTQTYICNVNHKPSNTKVDKKVEPKSC

SEQ ID NO: 631 - protein, 222 aa, synthetic construct
QVQLVQSGAEVKKPGSSVKVSCKASGYSITTYYIHWVRQAPGQGLEWMGWFFPGSGNIKYNEKFKGRVTITADTSTSTAYMELSSLRSEDTAVYYCAGSYYSYDVLDYWGQGTTVTVSSASTKGPSVFPLAPSSKSTSGGTAALGCLVKDYFPEPVTVSWNSGALTSGVHTFPAVLQSSGLYSLSSVVTVPSSSLGTQTYICNVNHKPSNTKVDKKVEPKSC

SEQ ID NO: 632 - protein, 222 aa, synthetic construct
QVQLVQSGAEVKKPGSSVKVSCKASGYSKTTYYIHWVRQAPGQGLEWMGWFFPGSGNIKYNEKFKGRVTITADTSTSTAYMELSSLRSEDTAVYYCAGSYYSYDVLDYWGQGTTVTVSSASTKGPSVFPLAPSSKSTSGGTAALGCLVKDYFPEPVTVSWNSGALTSGVHTFPAVLQSSGLYSLSSVVTVPSSSLGTQTYICNVNHKPSNTKVDKKVEPKSC

SEQ ID NO: 633 - protein, 222 aa, synthetic construct
QVQLVQSGAEVKKPGSSVKVSCKASGYSLTTYYIHWVRQAPGQGLEWMGWFFPGSGNIKYNEKFKGRVTITADTSTSTAYMELSSLRSEDTAVYYCAGSYYSYDVLDYWGQGTTVTVSSASTKGPSVFPLAPSSKSTSGGTAALGCLVKDYFPEPVTVSWNSGALTSGVHTFPAVLQSSGLYSLSSVVTVPSSSLGTQTYICNVNHKPSNTKVDKKVEPKSC

SEQ ID NO: 634 - protein, 222 aa, synthetic construct
QVQLVQSGAEVKKPGSSVKVSCKASGYSMTTYYIHWVRQAPGQGLEWMGWFFPGSGNIKYNEKFKGRVTITADTSTSTAYMELSSLRSEDTAVYYCAGSYYSYDVLDYWGQGTTVTVSSASTKGPSVFPLAPSSKSTSGGTAALGCLVKDYFPEPVTVSWNSGALTSGVHTFPAVLQSSGLYSLSSVVTVPSSSLGTQTYICNVNHKPSNTKVDKKVEPKSC

SEQ ID NO: 635 - protein, 222 aa, synthetic construct
QVQLVQSGAEVKKPGSSVKVSCKASGYSNTTYYIHWVRQAPGQGLEWMGWFFPGSGNIKYNEKFKGRVTITADTSTSTAYMELSSLRSEDTAVYYCAGSYYSYDVLDYWGQGTTVTVSSASTKGPSVFPLAPSSKSTSGGTAALGCLVKDYFPEPVTVSWNSGALTSGVHTFPAVLQSSGLYSLSSVVTVPSSSLGTQTYICNVNHKPSNTKVDKKVEPKSC

SEQ ID NO: 636 - protein, 222 aa, synthetic construct
QVQLVQSGAEVKKPGSSVKVSCKASGYSPTTYYIHWVRQAPGQGLEWMGWFFPGSGNIKYNEKFKGRVTITADTSTSTAYMELSSLRSEDTAVYYCAGSYYSYDVLDYWGQGTTVTVSSASTKGPSVFPLAPSSKSTSGGTAALGCLVKDYFPEPVTVSWNSGALTSGVHTFPAVLQSSGLYSLSSVVTVPSSSLGTQTYICNVNHKPSNTKVDKKVEPKSC

SEQ ID NO: 637 - protein, 222 aa, synthetic construct
QVQLVQSGAEVKKPGSSVKVSCKASGYSQTTYYIHWVRQAPGQGLEWMGWFFPGSGNIKYNEKFKGRVTITADTSTSTAYMELSSLRSEDTAVYYCAGSYYSYDVLDYWGQGTTVTVSSASTKGPSVFPLAPSSKSTSGGTAALGCLVKDYFPEPVTVSWNSGALTSGVHTFPAVLQSSGLYSLSSVVTVPSSSLGTQTYICNVNHKPSNTKVDKKVEPKSC

SEQ ID NO: 638 - protein, 222 aa, synthetic construct
QVQLVQSGAEVKKPGSSVKVSCKASGYSRTTYYIHWVRQAPGQGLEWMGWFFPGSGNIKYNEKFKGRVTITADTSTSTAYMELSSLRSEDTAVYYCAGSYYSYDVLDYWGQGTTVTVSSASTKGPSVFPLAPSSKSTSGGTAALGCLVKDYFPEPVTVSWNSGALTSGVHTFPAVLQSSGLYSLSSVVTVPSSSLGTQTYICNVNHKPSNTKVDKKVEPKSC

SEQ ID NO: 639 - protein, 222 aa, synthetic construct
QVQLVQSGAEVKKPGSSVKVSCKASGYSSTTYYIHWVRQAPGQGLEWMGWFFPGSGNIKYNEKFKGRVTITADTSTSTAYMELSSLRSEDTAVYYCAGSYYSYDVLDYWGQGTTVTVSSASTKGPSVFPLAPSSKSTSGGTAALGCLVKDYFPEPVTVSWNSGALTSGVHTFPAVLQSSGLYSLSSVVTVPSSSLGTQTYICNVNHKPSNTKVDKKVEPKSC

SEQ ID NO: 640 - protein, 222 aa, synthetic construct
QVQLVQSGAEVKKPGSSVKVSCKASGYSTTTYYIHWVRQAPGQGLEWMGWFFPGSGNIKYNEKFKGRVTITADTSTSTAYMELSSLRSEDTAVYYCAGSYYSYDVLDYWGQGTTVTVSSASTKGPSVFPLAPSSKSTSGGTAALGCLVKDYFPEPVTVSWNSGALTSGVHTFPAVLQSSGLYSLSSVVTVPSSSLGTQTYICNVNHKPSNTKVDKKVEPKSC

SEQ ID NO: 641 - protein, 222 aa, synthetic construct
QVQLVQSGAEVKKPGSSVKVSCKASGYSVTTYYIHWVRQAPGQGLEWMGWFFPGSGNIKYNEKFKGRVTITADTSTSTAYMELSSLRSEDTAVYYCAGSYYSYDVLDYWGQGTTVTVSSASTKGPSVFPLAPSSKSTSGGTAALGCLVKDYFPEPVTVSWNSGALTSGVHTFPAVLQSSGLYSLSSVVTVPSSSLGTQTYICNVNHKPSNTKVDKKVEPKSC

SEQ ID NO: 642 - protein, 222 aa, synthetic construct
QVQLVQSGAEVKKPGSSVKVSCKASGYSWTTYYIHWVRQAPGQGLEWMGWFFPGSGNIKYNEKFKGRVTITADTSTSTAYMELSSLRSEDTAVYYCAGSYYSYDVLDYWGQGTTVTVSSASTKGPSVFPLAPSSKSTSGGTAALGCLVKDYFPEPVTVSWNSGALTSGVHTFPAVLQSSGLYSLSSVVTVPSSSLGTQTYICNVNHKPSNTKVDKKVEPKSC

SEQ ID NO: 643 - protein, 222 aa, synthetic construct
QVQLVQSGAEVKKPGSSVKVSCKASGYSYTTYYIHWVRQAPGQGLEWMGWFFPGSGNIKYNEKFKGRVTITADTSTSTAYMELSSLRSEDTAVYYCAGSYYSYDVLDYWGQGTTVTVSSASTKGPSVFPLAPSSKSTSGGTAALGCLVKDYFPEPVTVSWNSGALTSGVHTFPAVLQSSGLYSLSSVVTVPSSSLGTQTYICNVNHKPSNTKVDKKVEPKSC

SEQ ID NO: 644 - protein, 222 aa, synthetic construct
QVQLVQSGAEVKKPGSSVKVSCKASGYSFATYYIHWVRQAPGQGLEWMGWFFPGSGNIKYNEKFKGRVTITADTSTSTAYMELSSLRSEDTAVYYCAGSYYSYDVLDYWGQGTTVTVSSASTKGPSVFPLAPSSKSTSGGTAALGCLVKDYFPEPVTVSWNSGALTSGVHTFPAVLQSSGLYSLSSVVTVPSSSLGTQTYICNVNHKPSNTKVDKKVEPKSC

SEQ ID NO: 645 - protein, 222 aa, synthetic construct
QVQLVQSGAEVKKPGSSVKVSCKASGYSFETYYIHWVRQAPGQGLEWMGWFFPGSGNIKYNEKFKGRVTITADTSTSTAYMELSSLRSEDTAVYYCAGSYYSYDVLDYWGQGTTVTVSSASTKGPSVFPLAPSSKSTSGGTAALGCLVKDYFPEPVTVSWNSGALTSGVHTFPAVLQSSGLYSLSSVVTVPSSSLGTQTYICNVNHKPSNTKVDKKVEPKSC

SEQ ID NO: 646 - protein, 222 aa, synthetic construct
QVQLVQSGAEVKKPGSSVKVSCKASGYSFFTYYIHWVRQAPGQGLEWMGWFFPGSGNIKYNEKFKGRVTITADTSTSTAYMELSSLRSEDTAVYYCAGSYYSYDVLDYWGQGTTVTVSSASTKGPSVFPLAPSSKSTSGGTAALGCLVKDYFPEPVTVSWNSGALTSGVHTFPAVLQSSGLYSLSSVVTVPSSSLGTQTYICNVNHKPSNTKVDKKVEPKSC

SEQ ID NO: 647 - protein, 222 aa, synthetic construct
QVQLVQSGAEVKKPGSSVKVSCKASGYSFGTYYIHWVRQAPGQGLEWMGWFFPGSGNIKYNEKFKGRVTITADTSTSTAYMELSSLRSEDTAVYYCAGSYYSYDVLDYWGQGTTVTVSSASTKGPSVFPLAPSSKSTSGGTAALGCLVKDYFPEPVTVSWNSGALTSGVHTFPAVLQSSGLYSLSSVVTVPSSSLGTQTYICNVNHKPSNTKVDKKVEPKSC

SEQ ID NO: 648 - protein, 222 aa, synthetic construct
QVQLVQSGAEVKKPGSSVKVSCKASGYSFHTYYIHWVRQAPGQGLEWMGWFFPGSGNIKYNEKFKGRVTITADTSTSTAYMELSSLRSEDTAVYYCAGSYYSYDVLDYWGQGTTVTVSSASTKGPSVFPLAPSSKSTSGGTAALGCLVKDYFPEPVTVSWNSGALTSGVHTFPAVLQSSGLYSLSSVVTVPSSSLGTQTYICNVNHKPSNTKVDKKVEPKSC

SEQ ID NO: 649 - protein, 222 aa, synthetic construct
QVQLVQSGAEVKKPGSSVKVSCKASGYSFITYYIHWVRQAPGQGLEWMGWFFPGSGNIKYNEKFKGRVTITADTSTSTAYMELSSLRSEDTAVYYCAGSYYSYDVLDYWGQGTTVTVSSASTKGPSVFPLAPSSKSTSGGTAALGCLVKDYFPEPVTVSWNSGALTSGVHTFPAVLQSSGLYSLSSVVTVPSSSLGTQTYICNVNHKPSNTKVDKKVEPKSC

SEQ ID NO: 650 - protein, 222 aa, synthetic construct
QVQLVQSGAEVKKPGSSVKVSCKASGYSFKTYYIHWVRQAPGQGLEWMGWFFPGSGNIKYNEKFKGRVTITADTSTSTAYMELSSLRSEDTAVYYCAGSYYSYDVLDYWGQGTTVTVSSASTKGPSVFPLAPSSKSTSGGTAALGCLVKDYFPEPVTVSWNSGALTSGVHTFPAVLQSSGLYSLSSVVTVPSSSLGTQTYICNVNHKPSNTKVDKKVEPKSC

SEQ ID NO: 651 - protein, 222 aa, synthetic construct
QVQLVQSGAEVKKPGSSVKVSCKASGYSFLTYYIHWVRQAPGQGLEWMGWFFPGSGNIKYNEKFKGRVTITADTSTSTAYMELSSLRSEDTAVYYCAGSYYSYDVLDYWGQGTTVTVSSASTKGPSVFPLAPSSKSTSGGTAALGCLVKDYFPEPVTVSWNSGALTSGVHTFPAVLQSSGLYSLSSVVTVPSSSLGTQTYICNVNHKPSNTKVDKKVEPKSC

SEQ ID NO: 652 - protein, 222 aa, synthetic construct
QVQLVQSGAEVKKPGSSVKVSCKASGYSFMTYYIHWVRQAPGQGLEWMGWFFPGSGNIKYNEKFKGRVTITADTSTSTAYMELSSLRSEDTAVYYCAGSYYSYDVLDYWGQGTTVTVSSASTKGPSVFPLAPSSKSTSGGTAALGCLVKDYFPEPVTVSWNSGALTSGVHTFPAVLQSSGLYSLSSVVTVPSSSLGTQTYICNVNHKPSNTKVDKKVEPKSC

SEQ ID NO: 653 - protein, 222 aa, synthetic construct
QVQLVQSGAEVKKPGSSVKVSCKASGYSFNTYYIHWVRQAPGQGLEWMGWFFPGSGNIKYNEKFKGRVTITADTSTSTAYMELSSLRSEDTAVYYCAGSYYSYDVLDYWGQGTTVTVSSASTKGPSVFPLAPSSKSTSGGTAALGCLVKDYFPEPVTVSWNSGALTSGVHTFPAVLQSSGLYSLSSVVTVPSSSLGTQTYICNVNHKPSNTKVDKKVEPKSC

SEQ ID NO: 654 - protein, 222 aa, synthetic construct
QVQLVQSGAEVKKPGSSVKVSCKASGYSFPTYYIHWVRQAPGQGLEWMGWFFPGSGNIKYNEKFKGRVTITADTSTSTAYMELSSLRSEDTAVYYCAGSYYSYDVLDYWGQGTTVTVSSASTKGPSVFPLAPSSKSTSGGTAALGCLVKDYFPEPVTVSWNSGALTSGVHTFPAVLQSSGLYSLSSVVTVPSSSLGTQTYICNVNHKPSNTKVDKKVEPKSC

SEQ ID NO: 655 - protein, 222 aa, synthetic construct
QVQLVQSGAEVKKPGSSVKVSCKASGYSFQTYYIHWVRQAPGQGLEWMGWFFPGSGNIKYNEKFKGRVTITADTSTSTAYMELSSLRSEDTAVYYCAGSYYSYDVLDYWGQGTTVTVSSASTKGPSVFPLAPSSKSTSGGTAALGCLVKDYFPEPVTVSWNSGALTSGVHTFPAVLQSSGLYSLSSVVTVPSSSLGTQTYICNVNHKPSNTKVDKKVEPKSC

SEQ ID NO: 656 - protein, 222 aa, synthetic construct
QVQLVQSGAEVKKPGSSVKVSCKASGYSFRTYYIHWVRQAPGQGLEWMGWFFPGSGNIKYNEKFKGRVTITADTSTSTAYMELSSLRSEDTAVYYCAGSYYSYDVLDYWGQGTTVTVSSASTKGPSVFPLAPSSKSTSGGTAALGCLVKDYFPEPVTVSWNSGALTSGVHTFPAVLQSSGLYSLSSVVTVPSSSLGTQTYICNVNHKPSNTKVDKKVEPKSC

SEQ ID NO: 657 - protein, 222 aa, synthetic construct
QVQLVQSGAEVKKPGSSVKVSCKASGYSFSTYYIHWVRQAPGQGLEWMGWFFPGSGNIKYNEKFKGRVTITADTSTSTAYMELSSLRSEDTAVYYCAGSYYSYDVLDYWGQGTTVTVSSASTKGPSVFPLAPSSKSTSGGTAALGCLVKDYFPEPVTVSWNSGALTSGVHTFPAVLQSSGLYSLSSVVTVPSSSLGTQTYICNVNHKPSNTKVDKKVEPKSC

SEQ ID NO: 658 - protein, 222 aa, synthetic construct
QVQLVQSGAEVKKPGSSVKVSCKASGYSFVTYYIHWVRQAPGQGLEWMGWFFPGSGNIKYNEKFKGRVTITADTSTSTAYMELSSLRSEDTAVYYCAGSYYSYDVLDYWGQGTTVTVSSASTKGPSVFPLAPSSKSTSGGTAALGCLVKDYFPEPVTVSWNSGALTSGVHTFPAVLQSSGLYSLSSVVTVPSSSLGTQTYICNVNHKPSNTKVDKKVEPKSC

SEQ ID NO: 659 - protein, 222 aa, synthetic construct
QVQLVQSGAEVKKPGSSVKVSCKASGYSFWTYYIHWVRQAPGQGLEWMGWFFPGSGNIKYNEKFKGRVTITADTSTSTAYMELSSLRSEDTAVYYCAGSYYSYDVLDYWGQGTTVTVSSASTKGPSVFPLAPSSKSTSGGTAALGCLVKDYFPEPVTVSWNSGALTSGVHTFPAVLQSSGLYSLSSVVTVPSSSLGTQTYICNVNHKPSNTKVDKKVEPKSC

SEQ ID NO: 660 - protein, 222 aa, synthetic construct
QVQLVQSGAEVKKPGSSVKVSCKASGYSFYTYYIHWVRQAPGQGLEWMGWFFPGSGNIKYNEKFKGRVTITADTSTSTAYMELSSLRSEDTAVYYCAGSYYSYDVLDYWGQGTTVTVSSASTKGPSVFPLAPSSKSTSGGTAALGCLVKDYFPEPVTVSWNSGALTSGVHTFPAVLQSSGLYSLSSVVTVPSSSLGTQTYICNVNHKPSNTKVDKKVEPKSC

SEQ ID NO: 661 - protein, 222 aa, synthetic construct
QVQLVQSGAEVKKPGSSVKVSCKASGYSFTAYYIHWVRQAPGQGLEWMGWFFPGSGNIKYNEKFKGRVTITADTSTSTAYMELSSLRSEDTAVYYCAGSYYSYDVLDYWGQGTTVTVSSASTKGPSVFPLAPSSKSTSGGTAALGCLVKDYFPEPVTVSWNSGALTSGVHTFPAVLQSSGLYSLSSVVTVPSSSLGTQTYICNVNHKPSNTKVDKKVEPKSC

SEQ ID NO: 662 - protein, 222 aa, synthetic construct
QVQLVQSGAEVKKPGSSVKVSCKASGYSFTDYYIHWVRQAPGQGLEWMGWFFPGSGNIKYNEKFKGRVTITADTSTSTAYMELSSLRSEDTAVYYCAGSYYSYDVLDYWGQGTTVTVSSASTKGPSVFPLAPSSKSTSGGTAALGCLVKDYFPEPVTVSWNSGALTSGVHTFPAVLQSSGLYSLSSVVTVPSSSLGTQTYICNVNHKPSNTKVDKKVEPKSC

SEQ ID NO: 663 - protein, 222 aa, synthetic construct
QVQLVQSGAEVKKPGSSVKVSCKASGYSFTEYYIHWVRQAPGQGLEWMGWFFPGSGNIKYNEKFKGRVTITADTSTSTAYMELSSLRSEDTAVYYCAGSYYSYDVLDYWGQGTTVTVSSASTKGPSVFPLAPSSKSTSGGTAALGCLVKDYFPEPVTVSWNSGALTSGVHTFPAVLQSSGLYSLSSVVTVPSSSLGTQTYICNVNHKPSNTKVDKKVEPKSC

SEQ ID NO: 664 - protein, 222 aa, synthetic construct
QVQLVQSGAEVKKPGSSVKVSCKASGYSFTFYYIHWVRQAPGQGLEWMGWFFPGSGNIKYNEKFKGRVTITADTSTSTAYMELSSLRSEDTAVYYCAGSYYSYDVLDYWGQGTTVTVSSASTKGPSVFPLAPSSKSTSGGTAALGCLVKDYFPEPVTVSWNSGALTSGVHTFPAVLQSSGLYSLSSVVTVPSSSLGTQTYICNVNHKPSNTKVDKKVEPKSC

SEQ ID NO: 665 - protein, 222 aa, synthetic construct
QVQLVQSGAEVKKPGSSVKVSCKASGYSFTGYYIHWVRQAPGQGLEWMGWFFPGSGNIKYNEKFKGRVTITADTSTSTAYMELSSLRSEDTAVYYCAGSYYSYDVLDYWGQGTTVTVSSASTKGPSVFPLAPSSKSTSGGTAALGCLVKDYFPEPVTVSWNSGALTSGVHTFPAVLQSSGLYSLSSVVTVPSSSLGTQTYICNVNHKPSNTKVDKKVEPKSC

SEQ ID NO: 666 - protein, 222 aa, synthetic construct
QVQLVQSGAEVKKPGSSVKVSCKASGYSFTHYYIHWVRQAPGQGLEWMGWFFPGSGNIKYNEKFKGRVTITADTSTSTAYMELSSLRSEDTAVYYCAGSYYSYDVLDYWGQGTTVTVSSASTKGPSVFPLAPSSKSTSGGTAALGCLVKDYFPEPVTVSWNSGALTSGVHTFPAVLQSSGLYSLSSVVTVPSSSLGTQTYICNVNHKPSNTKVDKKVEPKSC

SEQ ID NO: 667 - protein, 222 aa, synthetic construct
QVQLVQSGAEVKKPGSSVKVSCKASGYSFTIYYIHWVRQAPGQGLEWMGWFFPGSGNIKYNEKFKGRVTITADTSTSTAYMELSSLRSEDTAVYYCAGSYYSYDVLDYWGQGTTVTVSSASTKGPSVFPLAPSSKSTSGGTAALGCLVKDYFPEPVTVSWNSGALTSGVHTFPAVLQSSGLYSLSSVVTVPSSSLGTQTYICNVNHKPSNTKVDKKVEPKSC

SEQ ID NO: 668 - protein, 222 aa, synthetic construct
QVQLVQSGAEVKKPGSSVKVSCKASGYSFTKYYIHWVRQAPGQGLEWMGWFFPGSGNIKYNEKFKGRVTITADTSTSTAYMELSSLRSEDTAVYYCAGSYYSYDVLDYWGQGTTVTVSSASTKGPSVFPLAPSSKSTSGGTAALGCLVKDYFPEPVTVSWNSGALTSGVHTFPAVLQSSGLYSLSSVVTVPSSSLGTQTYICNVNHKPSNTKVDKKVEPKSC

SEQ ID NO: 669 - protein, 222 aa, synthetic construct
QVQLVQSGAEVKKPGSSVKVSCKASGYSFTLYYIHWVRQAPGQGLEWMGWFFPGSGNIKYNEKFKGRVTITADTSTSTAYMELSSLRSEDTAVYYCAGSYYSYDVLDYWGQGTTVTVSSASTKGPSVFPLAPSSKSTSGGTAALGCLVKDYFPEPVTVSWNSGALTSGVHTFPAVLQSSGLYSLSSVVTVPSSSLGTQTYICNVNHKPSNTKVDKKVEPKSC

SEQ ID NO: 670 - protein, 222 aa, synthetic construct
QVQLVQSGAEVKKPGSSVKVSCKASGYSFTPYYIHWVRQAPGQGLEWMGWFFPGSGNIKYNEKFKGRVTITADTSTSTAYMELSSLRSEDTAVYYCAGSYYSYDVLDYWGQGTTVTVSSASTKGPSVFPLAPSSKSTSGGTAALGCLVKDYFPEPVTVSWNSGALTSGVHTFPAVLQSSGLYSLSSVVTVPSSSLGTQTYICNVNHKPSNTKVDKKVEPKSC

SEQ ID NO: 671 - protein, 222 aa, synthetic construct
QVQLVQSGAEVKKPGSSVKVSCKASGYSFTQYYIHWVRQAPGQGLEWMGWFFPGSGNIKYNEKFKGRVTITADTSTSTAYMELSSLRSEDTAVYYCAGSYYSYDVLDYWGQGTTVTVSSASTKGPSVFPLAPSSKSTSGGTAALGCLVKDYFPEPVTVSWNSGALTSGVHTFPAVLQSSGLYSLSSVVTVPSSSLGTQTYICNVNHKPSNTKVDKKVEPKSC

SEQ ID NO: 672 - protein, 222 aa, synthetic construct
QVQLVQSGAEVKKPGSSVKVSCKASGYSFTRYYIHWVRQAPGQGLEWMGWFFPGSGNIKYNEKFKGRVTITADTSTSTAYMELSSLRSEDTAVYYCAGSYYSYDVLDYWGQGTTVTVSSASTKGPSVFPLAPSSKSTSGGTAALGCLVKDYFPEPVTVSWNSGALTSGVHTFPAVLQSSGLYSLSSVVTVPSSSLGTQTYICNVNHKPSNTKVDKKVEPKSC

SEQ ID NO: 673 - protein, 222 aa, synthetic construct
QVQLVQSGAEVKKPGSSVKVSCKASGYSFTSYYIHWVRQAPGQGLEWMGWFFPGSGNIKYNEKFKGRVTITADTSTSTAYMELSSLRSEDTAVYYCAGSYYSYDVLDYWGQGTTVTVSSASTKGPSVFPLAPSSKSTSGGTAALGCLVKDYFPEPVTVSWNSGALTSGVHTFPAVLQSSGLYSLSSVVTVPSSSLGTQTYICNVNHKPSNTKVDKKVEPKSC

SEQ ID NO: 674 - protein, 222 aa, synthetic construct
QVQLVQSGAEVKKPGSSVKVSCKASGYSFTVYYIHWVRQAPGQGLEWMGWFFPGSGNIKYNEKFKGRVTITADTSTSTAYMELSSLRSEDTAVYYCAGSYYSYDVLDYWGQGTTVTVSSASTKGPSVFPLAPSSKSTSGGTAALGCLVKDYFPEPVTVSWNSGALTSGVHTFPAVLQSSGLYSLSSVVTVPSSSLGTQTYICNVNHKPSNTKVDKKVEPKSC

SEQ ID NO: 675 - protein, 222 aa, synthetic construct
QVQLVQSGAEVKKPGSSVKVSCKASGYSFTWYYIHWVRQAPGQGLEWMGWFFPGSGNIKYNEKFKGRVTITADTSTSTAYMELSSLRSEDTAVYYCAGSYYSYDVLDYWGQGTTVTVSSASTKGPSVFPLAPSSKSTSGGTAALGCLVKDYFPEPVTVSWNSGALTSGVHTFPAVLQSSGLYSLSSVVTVPSSSLGTQTYICNVNHKPSNTKVDKKVEPKSC

SEQ ID NO: 676 - protein, 222 aa, synthetic construct
QVQLVQSGAEVKKPGSSVKVSCKASGYSFTYYYIHWVRQAPGQGLEWMGWFFPGSGNIKYNEKFKGRVTITADTSTSTAYMELSSLRSEDTAVYYCAGSYYSYDVLDYWGQGTTVTVSSASTKGPSVFPLAPSSKSTSGGTAALGCLVKDYFPEPVTVSWNSGALTSGVHTFPAVLQSSGLYSLSSVVTVPSSSLGTQTYICNVNHKPSNTKVDKKVEPKSC

SEQ ID NO: 677 - protein, 222 aa, synthetic construct
QVQLVQSGAEVKKPGSSVKVSCKASGYSFTTAYIHWVRQAPGQGLEWMGWFFPGSGNIKYNEKFKGRVTITADTSTSTAYMELSSLRSEDTAVYYCAGSYYSYDVLDYWGQGTTVTVSSASTKGPSVFPLAPSSKSTSGGTAALGCLVKDYFPEPVTVSWNSGALTSGVHTFPAVLQSSGLYSLSSVVTVPSSSLGTQTYICNVNHKPSNTKVDKKVEPKSC

SEQ ID NO: 678 - protein, 222 aa, synthetic construct
QVQLVQSGAEVKKPGSSVKVSCKASGYSFTTDYIHWVRQAPGQGLEWMGWFFPGSGNIKYNEKFKGRVTITADTSTSTAYMELSSLRSEDTAVYYCAGSYYSYDVLDYWGQGTTVTVSSASTKGPSVFPLAPSSKSTSGGTAALGCLVKDYFPEPVTVSWNSGALTSGVHTFPAVLQSSGLYSLSSVVTVPSSSLGTQTYICNVNHKPSNTKVDKKVEPKSC

SEQ ID NO: 679 - protein, 222 aa, synthetic construct
QVQLVQSGAEVKKPGSSVKVSCKASGYSFTTEYIHWVRQAPGQGLEWMGWFFPGSGNIKYNEKFKGRVTITADTSTSTAYMELSSLRSEDTAVYYCAGSYYSYDVLDYWGQGTTVTVSSASTKGPSVFPLAPSSKSTSGGTAALGCLVKDYFPEPVTVSWNSGALTSGVHTFPAVLQSSGLYSLSSVVTVPSSSLGTQTYICNVNHKPSNTKVDKKVEPKSC

SEQ ID NO: 680 - protein, 222 aa, synthetic construct
QVQLVQSGAEVKKPGSSVKVSCKASGYSFTTFYIHWVRQAPGQGLEWMGWFFPGSGNIKYNEKFKGRVTITADTSTSTAYMELSSLRSEDTAVYYCAGSYYSYDVLDYWGQGTTVTVSSASTKGPSVFPLAPSSKSTSGGTAALGCLVKDYFPEPVTVSWNSGALTSGVHTFPAVLQSSGLYSLSSVVTVPSSSLGTQTYICNVNHKPSNTKVDKKVEPKSC

SEQ ID NO: 681 - protein, 222 aa, synthetic construct
QVQLVQSGAEVKKPGSSVKVSCKASGYSFTTGYIHWVRQAPGQGLEWMGWFFPGSGNIKYNEKFKGRVTITADTSTSTAYMELSSLRSEDTAVYYCAGSYYSYDVLDYWGQGTTVTVSSASTKGPSVFPLAPSSKSTSGGTAALGCLVKDYFPEPVTVSWNSGALTSGVHTFPAVLQSSGLYSLSSVVTVPSSSLGTQTYICNVNHKPSNTKVDKKVEPKSC

SEQ ID NO: 682 - protein, 222 aa, synthetic construct
QVQLVQSGAEVKKPGSSVKVSCKASGYSFTTHYIHWVRQAPGQGLEWMGWFFPGSGNIKYNEKFKGRVTITADTSTSTAYMELSSLRSEDTAVYYCAGSYYSYDVLDYWGQGTTVTVSSASTKGPSVFPLAPSSKSTSGGTAALGCLVKDYFPEPVTVSWNSGALTSGVHTFPAVLQSSGLYSLSSVVTVPSSSLGTQTYICNVNHKPSNTKVDKKVEPKSC

SEQ ID NO: 683 - protein, 222 aa, synthetic construct
QVQLVQSGAEVKKPGSSVKVSCKASGYSFTTIYIHWVRQAPGQGLEWMGWFFPGSGNIKYNEKFKGRVTITADTSTSTAYMELSSLRSEDTAVYYCAGSYYSYDVLDYWGQGTTVTVSSASTKGPSVFPLAPSSKSTSGGTAALGCLVKDYFPEPVTVSWNSGALTSGVHTFPAVLQSSGLYSLSSVVTVPSSSLGTQTYICNVNHKPSNTKVDKKVEPKSC

SEQ ID NO: 684 - protein, 222 aa, synthetic construct
QVQLVQSGAEVKKPGSSVKVSCKASGYSFTTKYIHWVRQAPGQGLEWMGWFFPGSGNIKYNEKFKGRVTITADTSTSTAYMELSSLRSEDTAVYYCAGSYYSYDVLDYWGQGTTVTVSSASTKGPSVFPLAPSSKSTSGGTAALGCLVKDYFPEPVTVSWNSGALTSGVHTFPAVLQSSGLYSLSSVVTVPSSSLGTQTYICNVNHKPSNTKVDKKVEPKSC

SEQ ID NO: 685 - protein, 222 aa, synthetic construct
QVQLVQSGAEVKKPGSSVKVSCKASGYSFTTLYIHWVRQAPGQGLEWMGWFFPGSGNIKYNEKFKGRVTITADTSTSTAYMELSSLRSEDTAVYYCAGSYYSYDVLDYWGQGTTVTVSSASTKGPSVFPLAPSSKSTSGGTAALGCLVKDYFPEPVTVSWNSGALTSGVHTFPAVLQSSGLYSLSSVVTVPSSSLGTQTYICNVNHKPSNTKVDKKVEPKSC

SEQ ID NO: 686 - protein, 222 aa, synthetic construct
QVQLVQSGAEVKKPGSSVKVSCKASGYSFTTMYIHWVRQAPGQGLEWMGWFFPGSGNIKYNEKFKGRVTITADTSTSTAYMELSSLRSEDTAVYYCAGSYYSYDVLDYWGQGTTVTVSSASTKGPSVFPLAPSSKSTSGGTAALGCLVKDYFPEPVTVSWNSGALTSGVHTFPAVLQSSGLYSLSSVVTVPSSSLGTQTYICNVNHKPSNTKVDKKVEPKSC

SEQ ID NO: 687 - protein, 222 aa, synthetic construct
QVQLVQSGAEVKKPGSSVKVSCKASGYSFTTNYIHWVRQAPGQGLEWMGWFFPGSGNIKYNEKFKGRVTITADTSTSTAYMELSSLRSEDTAVYYCAGSYYSYDVLDYWGQGTTVTVSSASTKGPSVFPLAPSSKSTSGGTAALGCLVKDYFPEPVTVSWNSGALTSGVHTFPAVLQSSGLYSLSSVVTVPSSSLGTQTYICNVNHKPSNTKVDKKVEPKSC

SEQ ID NO: 688 - protein, 222 aa, synthetic construct
QVQLVQSGAEVKKPGSSVKVSCKASGYSFTTPYIHWVRQAPGQGLEWMGWFFPGSGNIKYNEKFKGRVTITADTSTSTAYMELSSLRSEDTAVYYCAGSYYSYDVLDYWGQGTTVTVSSASTKGPSVFPLAPSSKSTSGGTAALGCLVKDYFPEPVTVSWNSGALTSGVHTFPAVLQSSGLYSLSSVVTVPSSSLGTQTYICNVNHKPSNTKVDKKVEPKSC

SEQ ID NO: 689 - protein, 222 aa, synthetic construct
QVQLVQSGAEVKKPGSSVKVSCKASGYSFTTQYIHWVRQAPGQGLEWMGWFFPGSGNIKYNEKFKGRVTITADTSTSTAYMELSSLRSEDTAVYYCAGSYYSYDVLDYWGQGTTVTVSSASTKGPSVFPLAPSSKSTSGGTAALGCLVKDYFPEPVTVSWNSGALTSGVHTFPAVLQSSGLYSLSSVVTVPSSSLGTQTYICNVNHKPSNTKVDKKVEPKSC

SEQ ID NO: 690 - protein, 222 aa, synthetic construct
QVQLVQSGAEVKKPGSSVKVSCKASGYSFTTRYIHWVRQAPGQGLEWMGWFFPGSGNIKYNEKFKGRVTITADTSTSTAYMELSSLRSEDTAVYYCAGSYYSYDVLDYWGQGTTVTVSSASTKGPSVFPLAPSSKSTSGGTAALGCLVKDYFPEPVTVSWNSGALTSGVHTFPAVLQSSGLYSLSSVVTVPSSSLGTQTYICNVNHKPSNTKVDKKVEPKSC

SEQ ID NO: 691 - protein, 222 aa, synthetic construct
QVQLVQSGAEVKKPGSSVKVSCKASGYSFTTTYIHWVRQAPGQGLEWMGWFFPGSGNIKYNEKFKGRVTITADTSTSTAYMELSSLRSEDTAVYYCAGSYYSYDVLDYWGQGTTVTVSSASTKGPSVFPLAPSSKSTSGGTAALGCLVKDYFPEPVTVSWNSGALTSGVHTFPAVLQSSGLYSLSSVVTVPSSSLGTQTYICNVNHKPSNTKVDKKVEPKSC

SEQ ID NO: 692 - protein, 222 aa, synthetic construct
QVQLVQSGAEVKKPGSSVKVSCKASGYSFTTVYIHWVRQAPGQGLEWMGWFFPGSGNIKYNEKFKGRVTITADTSTSTAYMELSSLRSEDTAVYYCAGSYYSYDVLDYWGQGTTVTVSSASTKGPSVFPLAPSSKSTSGGTAALGCLVKDYFPEPVTVSWNSGALTSGVHTFPAVLQSSGLYSLSSVVTVPSSSLGTQTYICNVNHKPSNTKVDKKVEPKSC

SEQ ID NO: 693 - protein, 222 aa, synthetic construct
QVQLVQSGAEVKKPGSSVKVSCKASGYSFTTWYIHWVRQAPGQGLEWMGWFFPGSGNIKYNEKFKGRVTITADTSTSTAYMELSSLRSEDTAVYYCAGSYYSYDVLDYWGQGTTVTVSSASTKGPSVFPLAPSSKSTSGGTAALGCLVKDYFPEPVTVSWNSGALTSGVHTFPAVLQSSGLYSLSSVVTVPSSSLGTQTYICNVNHKPSNTKVDKKVEPKSC

SEQ ID NO: 694 - protein, 222 aa, synthetic construct
QVQLVQSGAEVKKPGSSVKVSCKASGYSFTTYYIAWVRQAPGQGLEWMGWFFPGSGNIKYNEKFKGRVTITADTSTSTAYMELSSLRSEDTAVYYCAGSYYSYDVLDYWGQGTTVTVSSASTKGPSVFPLAPSSKSTSGGTAALGCLVKDYFPEPVTVSWNSGALTSGVHTFPAVLQSSGLYSLSSVVTVPSSSLGTQTYICNVNHKPSNTKVDKKVEPKSC

SEQ ID NO: 695 - protein, 222 aa, synthetic construct
QVQLVQSGAEVKKPGSSVKVSCKASGYSFTTYYIDWVRQAPGQGLEWMGWFFPGSGNIKYNEKFKGRVTITADTSTSTAYMELSSLRSEDTAVYYCAGSYYSYDVLDYWGQGTTVTVSSASTKGPSVFPLAPSSKSTSGGTAALGCLVKDYFPEPVTVSWNSGALTSGVHTFPAVLQSSGLYSLSSVVTVPSSSLGTQTYICNVNHKPSNTKVDKKVEPKSC

SEQ ID NO: 696 - protein, 222 aa, synthetic construct
QVQLVQSGAEVKKPGSSVKVSCKASGYSFTTYYIEWVRQAPGQGLEWMGWFFPGSGNIKYNEKFKGRVTITADTSTSTAYMELSSLRSEDTAVYYCAGSYYSYDVLDYWGQGTTVTVSSASTKGPSVFPLAPSSKSTSGGTAALGCLVKDYFPEPVTVSWNSGALTSGVHTFPAVLQSSGLYSLSSVVTVPSSSLGTQTYICNVNHKPSNTKVDKKVEPKSC

SEQ ID NO: 697 - protein, 222 aa, synthetic construct
QVQLVQSGAEVKKPGSSVKVSCKASGYSFTTYYIFWVRQAPGQGLEWMGWFFPGSGNIKYNEKFKGRVTITADTSTSTAYMELSSLRSEDTAVYYCAGSYYSYDVLDYWGQGTTVTVSSASTKGPSVFPLAPSSKSTSGGTAALGCLVKDYFPEPVTVSWNSGALTSGVHTFPAVLQSSGLYSLSSVVTVPSSSLGTQTYICNVNHKPSNTKVDKKVEPKSC

SEQ ID NO: 698 - protein, 222 aa, synthetic construct
QVQLVQSGAEVKKPGSSVKVSCKASGYSFTTYYIGWVRQAPGQGLEWMGWFFPGSGNIKYNEKFKGRVTITADTSTSTAYMELSSLRSEDTAVYYCAGSYYSYDVLDYWGQGTTVTVSSASTKGPSVFPLAPSSKSTSGGTAALGCLVKDYFPEPVTVSWNSGALTSGVHTFPAVLQSSGLYSLSSVVTVPSSSLGTQTYICNVNHKPSNTKVDKKVEPKSC

SEQ ID NO: 699 - protein, 222 aa, synthetic construct
QVQLVQSGAEVKKPGSSVKVSCKASGYSFTTYYIKWVRQAPGQGLEWMGWFFPGSGNIKYNEKFKGRVTITADTSTSTAYMELSSLRSEDTAVYYCAGSYYSYDVLDYWGQGTTVTVSSASTKGPSVFPLAPSSKSTSGGTAALGCLVKDYFPEPVTVSWNSGALTSGVHTFPAVLQSSGLYSLSSVVTVPSSSLGTQTYICNVNHKPSNTKVDKKVEPKSC

SEQ ID NO: 700 - protein, 222 aa, synthetic construct
QVQLVQSGAEVKKPGSSVKVSCKASGYSFTTYYILWVRQAPGQGLEWMGWFFPGSGNIKYNEKFKGRVTITADTSTSTAYMELSSLRSEDTAVYYCAGSYYSYDVLDYWGQGTTVTVSSASTKGPSVFPLAPSSKSTSGGTAALGCLVKDYFPEPVTVSWNSGALTSGVHTFPAVLQSSGLYSLSSVVTVPSSSLGTQTYICNVNHKPSNTKVDKKVEPKSC

SEQ ID NO: 701 - protein, 222 aa, synthetic construct
QVQLVQSGAEVKKPGSSVKVSCKASGYSFTTYYIMWVRQAPGQGLEWMGWFFPGSGNIKYNEKFKGRVTITADTSTSTAYMELSSLRSEDTAVYYCAGSYYSYDVLDYWGQGTTVTVSSASTKGPSVFPLAPSSKSTSGGTAALGCLVKDYFPEPVTVSWNSGALTSGVHTFPAVLQSSGLYSLSSVVTVPSSSLGTQTYICNVNHKPSNTKVDKKVEPKSC

SEQ ID NO: 702 - protein, 222 aa, synthetic construct
QVQLVQSGAEVKKPGSSVKVSCKASGYSFTTYYINWVRQAPGQGLEWMGWFFPGSGNIKYNEKFKGRVTITADTSTSTAYMELSSLRSEDTAVYYCAGSYYSYDVLDYWGQGTTVTVSSASTKGPSVFPLAPSSKSTSGGTAALGCLVKDYFPEPVTVSWNSGALTSGVHTFPAVLQSSGLYSLSSVVTVPSSSLGTQTYICNVNHKPSNTKVDKKVEPKSC

SEQ ID NO: 703 - protein, 222 aa, synthetic construct
QVQLVQSGAEVKKPGSSVKVSCKASGYSFTTYYIPWVRQAPGQGLEWMGWFFPGSGNIKYNEKFKGRVTITADTSTSTAYMELSSLRSEDTAVYYCAGSYYSYDVLDYWGQGTTVTVSSASTKGPSVFPLAPSSKSTSGGTAALGCLVKDYFPEPVTVSWNSGALTSGVHTFPAVLQSSGLYSLSSVVTVPSSSLGTQTYICNVNHKPSNTKVDKKVEPKSC

SEQ ID NO: 704 - protein, 222 aa, synthetic construct
QVQLVQSGAEVKKPGSSVKVSCKASGYSFTTYYIQWVRQAPGQGLEWMGWFFPGSGNIKYNEKFKGRVTITADTSTSTAYMELSSLRSEDTAVYYCAGSYYSYDVLDYWGQGTTVTVSSASTKGPSVFPLAPSSKSTSGGTAALGCLVKDYFPEPVTVSWNSGALTSGVHTFPAVLQSSGLYSLSSVVTVPSSSLGTQTYICNVNHKPSNTKVDKKVEPKSC

SEQ ID NO: 705 - protein, 222 aa, synthetic construct
QVQLVQSGAEVKKPGSSVKVSCKASGYSFTTYYISWVRQAPGQGLEWMGWFFPGSGNIKYNEKFKGRVTITADTSTSTAYMELSSLRSEDTAVYYCAGSYYSYDVLDYWGQGTTVTVSSASTKGPSVFPLAPSSKSTSGGTAALGCLVKDYFPEPVTVSWNSGALTSGVHTFPAVLQSSGLYSLSSVVTVPSSSLGTQTYICNVNHKPSNTKVDKKVEPKSC

SEQ ID NO: 706 - protein, 222 aa, synthetic construct
QVQLVQSGAEVKKPGSSVKVSCKASGYSFTTYYITWVRQAPGQGLEWMGWFFPGSGNIKYNEKFKGRVTITADTSTSTAYMELSSLRSEDTAVYYCAGSYYSYDVLDYWGQGTTVTVSSASTKGPSVFPLAPSSKSTSGGTAALGCLVKDYFPEPVTVSWNSGALTSGVHTFPAVLQSSGLYSLSSVVTVPSSSLGTQTYICNVNHKPSNTKVDKKVEPKSC

SEQ ID NO: 707 - protein, 222 aa, synthetic construct
QVQLVQSGAEVKKPGSSVKVSCKASGYSFTTYYIVWVRQAPGQGLEWMGWFFPGSGNIKYNEKFKGRVTITADTSTSTAYMELSSLRSEDTAVYYCAGSYYSYDVLDYWGQGTTVTVSSASTKGPSVFPLAPSSKSTSGGTAALGCLVKDYFPEPVTVSWNSGALTSGVHTFPAVLQSSGLYSLSSVVTVPSSSLGTQTYICNVNHKPSNTKVDKKVEPKSC

SEQ ID NO: 708 - protein, 222 aa, synthetic construct
QVQLVQSGAEVKKPGSSVKVSCKASGYSFTTYYIWWVRQAPGQGLEWMGWFFPGSGNIKYNEKFKGRVTITADTSTSTAYMELSSLRSEDTAVYYCAGSYYSYDVLDYWGQGTTVTVSSASTKGPSVFPLAPSSKSTSGGTAALGCLVKDYFPEPVTVSWNSGALTSGVHTFPAVLQSSGLYSLSSVVTVPSSSLGTQTYICNVNHKPSNTKVDKKVEPKSC

SEQ ID NO: 709 - protein, 222 aa, synthetic construct
QVQLVQSGAEVKKPGSSVKVSCKASGYSFTTYYIYWVRQAPGQGLEWMGWFFPGSGNIKYNEKFKGRVTITADTSTSTAYMELSSLRSEDTAVYYCAGSYYSYDVLDYWGQGTTVTVSSASTKGPSVFPLAPSSKSTSGGTAALGCLVKDYFPEPVTVSWNSGALTSGVHTFPAVLQSSGLYSLSSVVTVPSSSLGTQTYICNVNHKPSNTKVDKKVEPKSC

SEQ ID NO: 710 - protein, 222 aa, synthetic construct
QVQLVQSGAEVKKPGSSVKVSCKASGYSFTTYYIHWVRQAPGQGLEWMGAFFPGSGNIKYNEKFKGRVTITADTSTSTAYMELSSLRSEDTAVYYCAGSYYSYDVLDYWGQGTTVTVSSASTKGPSVFPLAPSSKSTSGGTAALGCLVKDYFPEPVTVSWNSGALTSGVHTFPAVLQSSGLYSLSSVVTVPSSSLGTQTYICNVNHKPSNTKVDKKVEPKSC

SEQ ID NO: 711 - protein, 222 aa, synthetic construct
QVQLVQSGAEVKKPGSSVKVSCKASGYSFTTYYIHWVRQAPGQGLEWMGDFFPGSGNIKYNEKFKGRVTITADTSTSTAYMELSSLRSEDTAVYYCAGSYYSYDVLDYWGQGTTVTVSSASTKGPSVFPLAPSSKSTSGGTAALGCLVKDYFPEPVTVSWNSGALTSGVHTFPAVLQSSGLYSLSSVVTVPSSSLGTQTYICNVNHKPSNTKVDKKVEPKSC

SEQ ID NO: 712 - protein, 222 aa, synthetic construct
QVQLVQSGAEVKKPGSSVKVSCKASGYSFTTYYIHWVRQAPGQGLEWMGEFFPGSGNIKYNEKFKGRVTITADTSTSTAYMELSSLRSEDTAVYYCAGSYYSYDVLDYWGQGTTVTVSSASTKGPSVFPLAPSSKSTSGGTAALGCLVKDYFPEPVTVSWNSGALTSGVHTFPAVLQSSGLYSLSSVVTVPSSSLGTQTYICNVNHKPSNTKVDKKVEPKSC

SEQ ID NO: 713 - protein, 222 aa, synthetic construct
QVQLVQSGAEVKKPGSSVKVSCKASGYSFTTYYIHWVRQAPGQGLEWMGFFFPGSGNIKYNEKFKGRVTITADTSTSTAYMELSSLRSEDTAVYYCAGSYYSYDVLDYWGQGTTVTVSSASTKGPSVFPLAPSSKSTSGGTAALGCLVKDYFPEPVTVSWNSGALTSGVHTFPAVLQSSGLYSLSSVVTVPSSSLGTQTYICNVNHKPSNTKVDKKVEPKSC

SEQ ID NO: 714 - protein, 222 aa, synthetic construct
QVQLVQSGAEVKKPGSSVKVSCKASGYSFTTYYIHWVRQAPGQGLEWMGGFFPGSGNIKYNEKFKGRVTITADTSTSTAYMELSSLRSEDTAVYYCAGSYYSYDVLDYWGQGTTVTVSSASTKGPSVFPLAPSSKSTSGGTAALGCLVKDYFPEPVTVSWNSGALTSGVHTFPAVLQSSGLYSLSSVVTVPSSSLGTQTYICNVNHKPSNTKVDKKVEPKSC

SEQ ID NO: 715 - protein, 222 aa, synthetic construct
QVQLVQSGAEVKKPGSSVKVSCKASGYSFTTYYIHWVRQAPGQGLEWMGHFFPGSGNIKYNEKFKGRVTITADTSTSTAYMELSSLRSEDTAVYYCAGSYYSYDVLDYWGQGTTVTVSSASTKGPSVFPLAPSSKSTSGGTAALGCLVKDYFPEPVTVSWNSGALTSGVHTFPAVLQSSGLYSLSSVVTVPSSSLGTQTYICNVNHKPSNTKVDKKVEPKSC

SEQ ID NO: 716 - protein, 222 aa, synthetic construct
QVQLVQSGAEVKKPGSSVKVSCKASGYSFTTYYIHWVRQAPGQGLEWMGIFFPGSGNIKYNEKFKGRVTITADTSTSTAYMELSSLRSEDTAVYYCAGSYYSYDVLDYWGQGTTVTVSSASTKGPSVFPLAPSSKSTSGGTAALGCLVKDYFPEPVTVSWNSGALTSGVHTFPAVLQSSGLYSLSSVVTVPSSSLGTQTYICNVNHKPSNTKVDKKVEPKSC

SEQ ID NO: 717 - protein, 222 aa, synthetic construct
QVQLVQSGAEVKKPGSSVKVSCKASGYSFTTYYIHWVRQAPGQGLEWMGLFFPGSGNIKYNEKFKGRVTITADTSTSTAYMELSSLRSEDTAVYYCAGSYYSYDVLDYWGQGTTVTVSSASTKGPSVFPLAPSSKSTSGGTAALGCLVKDYFPEPVTVSWNSGALTSGVHTFPAVLQSSGLYSLSSVVTVPSSSLGTQTYICNVNHKPSNTKVDKKVEPKSC

SEQ ID NO: 718 - protein, 222 aa, synthetic construct
QVQLVQSGAEVKKPGSSVKVSCKASGYSFTTYYIHWVRQAPGQGLEWMGMFFPGSGNIKYNEKFKGRVTITADTSTSTAYMELSSLRSEDTAVYYCAGSYYSYDVLDYWGQGTTVTVSSASTKGPSVFPLAPSSKSTSGGTAALGCLVKDYFPEPVTVSWNSGALTSGVHTFPAVLQSSGLYSLSSVVTVPSSSLGTQTYICNVNHKPSNTKVDKKVEPKSC

SEQ ID NO: 719 - protein, 222 aa, synthetic construct
QVQLVQSGAEVKKPGSSVKVSCKASGYSFTTYYIHWVRQAPGQGLEWMGNFFPGSGNIKYNEKFKGRVTITADTSTSTAYMELSSLRSEDTAVYYCAGSYYSYDVLDYWGQGTTVTVSSASTKGPSVFPLAPSSKSTSGGTAALGCLVKDYFPEPVTVSWNSGALTSGVHTFPAVLQSSGLYSLSSVVTVPSSSLGTQTYICNVNHKPSNTKVDKKVEPKSC

SEQ ID NO: 720 - protein, 222 aa, synthetic construct
QVQLVQSGAEVKKPGSSVKVSCKASGYSFTTYYIHWVRQAPGQGLEWMGPFFPGSGNIKYNEKFKGRVTITADTSTSTAYMELSSLRSEDTAVYYCAGSYYSYDVLDYWGQGTTVTVSSASTKGPSVFPLAPSSKSTSGGTAALGCLVKDYFPEPVTVSWNSGALTSGVHTFPAVLQSSGLYSLSSVVTVPSSSLGTQTYICNVNHKPSNTKVDKKVEPKSC

SEQ ID NO: 721 - protein, 222 aa, synthetic construct
QVQLVQSGAEVKKPGSSVKVSCKASGYSFTTYYIHWVRQAPGQGLEWMGQFFPGSGNIKYNEKFKGRVTITADTSTSTAYMELSSLRSEDTAVYYCAGSYYSYDVLDYWGQGTTVTVSSASTKGPSVFPLAPSSKSTSGGTAALGCLVKDYFPEPVTVSWNSGALTSGVHTFPAVLQSSGLYSLSSVVTVPSSSLGTQTYICNVNHKPSNTKVDKKVEPKSC

SEQ ID NO: 722 - protein, 222 aa, synthetic construct
QVQLVQSGAEVKKPGSSVKVSCKASGYSFTTYYIHWVRQAPGQGLEWMGRFFPGSGNIKYNEKFKGRVTITADTSTSTAYMELSSLRSEDTAVYYCAGSYYSYDVLDYWGQGTTVTVSSASTKGPSVFPLAPSSKSTSGGTAALGCLVKDYFPEPVTVSWNSGALTSGVHTFPAVLQSSGLYSLSSVVTVPSSSLGTQTYICNVNHKPSNTKVDKKVEPKSC

SEQ ID NO: 723 - protein, 222 aa, synthetic construct
QVQLVQSGAEVKKPGSSVKVSCKASGYSFTTYYIHWVRQAPGQGLEWMGSFFPGSGNIKYNEKFKGRVTITADTSTSTAYMELSSLRSEDTAVYYCAGSYYSYDVLDYWGQGTTVTVSSASTKGPSVFPLAPSSKSTSGGTAALGCLVKDYFPEPVTVSWNSGALTSGVHTFPAVLQSSGLYSLSSVVTVPSSSLGTQTYICNVNHKPSNTKVDKKVEPKSC

SEQ ID NO: 724 - protein, 222 aa, synthetic construct
QVQLVQSGAEVKKPGSSVKVSCKASGYSFTTYYIHWVRQAPGQGLEWMGTFFPGSGNIKYNEKFKGRVTITADTSTSTAYMELSSLRSEDTAVYYCAGSYYSYDVLDYWGQGTTVTVSSASTKGPSVFPLAPSSKSTSGGTAALGCLVKDYFPEPVTVSWNSGALTSGVHTFPAVLQSSGLYSLSSVVTVPSSSLGTQTYICNVNHKPSNTKVDKKVEPKSC

SEQ ID NO: 725 - protein, 222 aa, synthetic construct
QVQLVQSGAEVKKPGSSVKVSCKASGYSFTTYYIHWVRQAPGQGLEWMGVFFPGSGNIKYNEKFKGRVTITADTSTSTAYMELSSLRSEDTAVYYCAGSYYSYDVLDYWGQGTTVTVSSASTKGPSVFPLAPSSKSTSGGTAALGCLVKDYFPEPVTVSWNSGALTSGVHTFPAVLQSSGLYSLSSVVTVPSSSLGTQTYICNVNHKPSNTKVDKKVEPKSC

SEQ ID NO: 726 - protein, 222 aa, synthetic construct
QVQLVQSGAEVKKPGSSVKVSCKASGYSFTTYYIHWVRQAPGQGLEWMGYFFPGSGNIKYNEKFKGRVTITADTSTSTAYMELSSLRSEDTAVYYCAGSYYSYDVLDYWGQGTTVTVSSASTKGPSVFPLAPSSKSTSGGTAALGCLVKDYFPEPVTVSWNSGALTSGVHTFPAVLQSSGLYSLSSVVTVPSSSLGTQTYICNVNHKPSNTKVDKKVEPKSC

SEQ ID NO: 727 - protein, 222 aa, synthetic construct
QVQLVQSGAEVKKPGSSVKVSCKASGYSFTTYYIHWVRQAPGQGLEWMGWAFPGSGNIKYNEKFKGRVTITADTSTSTAYMELSSLRSEDTAVYYCAGSYYSYDVLDYWGQGTTVTVSSASTKGPSVFPLAPSSKSTSGGTAALGCLVKDYFPEPVTVSWNSGALTSGVHTFPAVLQSSGLYSLSSVVTVPSSSLGTQTYICNVNHKPSNTKVDKKVEPKSC

SEQ ID NO: 728 - protein, 222 aa, synthetic construct
QVQLVQSGAEVKKPGSSVKVSCKASGYSFTTYYIHWVRQAPGQGLEWMGWDFPGSGNIKYNEKFKGRVTITADTSTSTAYMELSSLRSEDTAVYYCAGSYYSYDVLDYWGQGTTVTVSSASTKGPSVFPLAPSSKSTSGGTAALGCLVKDYFPEPVTVSWNSGALTSGVHTFPAVLQSSGLYSLSSVVTVPSSSLGTQTYICNVNHKPSNTKVDKKVEPKSC

SEQ ID NO: 729 - protein, 222 aa, synthetic construct
QVQLVQSGAEVKKPGSSVKVSCKASGYSFTTYYIHWVRQAPGQGLEWMGWEFPGSGNIKYNEKFKGRVTITADTSTSTAYMELSSLRSEDTAVYYCAGSYYSYDVLDYWGQGTTVTVSSASTKGPSVFPLAPSSKSTSGGTAALGCLVKDYFPEPVTVSWNSGALTSGVHTFPAVLQSSGLYSLSSVVTVPSSSLGTQTYICNVNHKPSNTKVDKKVEPKSC

SEQ ID NO: 730 - protein, 222 aa, synthetic construct
QVQLVQSGAEVKKPGSSVKVSCKASGYSFTTYYIHWVRQAPGQGLEWMGWGFPGSGNIKYNEKFKGRVTITADTSTSTAYMELSSLRSEDTAVYYCAGSYYSYDVLDYWGQGTTVTVSSASTKGPSVFPLAPSSKSTSGGTAALGCLVKDYFPEPVTVSWNSGALTSGVHTFPAVLQSSGLYSLSSVVTVPSSSLGTQTYICNVNHKPSNTKVDKKVEPKSC

SEQ ID NO: 731 - protein, 222 aa, synthetic construct
QVQLVQSGAEVKKPGSSVKVSCKASGYSFTTYYIHWVRQAPGQGLEWMGWHFPGSGNIKYNEKFKGRVTITADTSTSTAYMELSSLRSEDTAVYYCAGSYYSYDVLDYWGQGTTVTVSSASTKGPSVFPLAPSSKSTSGGTAALGCLVKDYFPEPVTVSWNSGALTSGVHTFPAVLQSSGLYSLSSVVTVPSSSLGTQTYICNVNHKPSNTKVDKKVEPKSC

SEQ ID NO: 732 - protein, 222 aa, synthetic construct
QVQLVQSGAEVKKPGSSVKVSCKASGYSFTTYYIHWVRQAPGQGLEWMGWKFPGSGNIKYNEKFKGRVTITADTSTSTAYMELSSLRSEDTAVYYCAGSYYSYDVLDYWGQGTTVTVSSASTKGPSVFPLAPSSKSTSGGTAALGCLVKDYFPEPVTVSWNSGALTSGVHTFPAVLQSSGLYSLSSVVTVPSSSLGTQTYICNVNHKPSNTKVDKKVEPKSC

SEQ ID NO: 733 - protein, 222 aa, synthetic construct
QVQLVQSGAEVKKPGSSVKVSCKASGYSFTTYYIHWVRQAPGQGLEWMGWLFPGSGNIKYNEKFKGRVTITADTSTSTAYMELSSLRSEDTAVYYCAGSYYSYDVLDYWGQGTTVTVSSASTKGPSVFPLAPSSKSTSGGTAALGCLVKDYFPEPVTVSWNSGALTSGVHTFPAVLQSSGLYSLSSVVTVPSSSLGTQTYICNVNHKPSNTKVDKKVEPKSC

SEQ ID NO: 734 - protein, 222 aa, synthetic construct
QVQLVQSGAEVKKPGSSVKVSCKASGYSFTTYYIHWVRQAPGQGLEWMGWMFPGSGNIKYNEKFKGRVTITADTSTSTAYMELSSLRSEDTAVYYCAGSYYSYDVLDYWGQGTTVTVSSASTKGPSVFPLAPSSKSTSGGTAALGCLVKDYFPEPVTVSWNSGALTSGVHTFPAVLQSSGLYSLSSVVTVPSSSLGTQTYICNVNHKPSNTKVDKKVEPKSC

SEQ ID NO: 735 - protein, 222 aa, synthetic construct
QVQLVQSGAEVKKPGSSVKVSCKASGYSFTTYYIHWVRQAPGQGLEWMGWNFPGSGNIKYNEKFKGRVTITADTSTSTAYMELSSLRSEDTAVYYCAGSYYSYDVLDYWGQGTTVTVSSASTKGPSVFPLAPSSKSTSGGTAALGCLVKDYFPEPVTVSWNSGALTSGVHTFPAVLQSSGLYSLSSVVTVPSSSLGTQTYICNVNHKPSNTKVDKKVEPKSC

SEQ ID NO: 736 - protein, 222 aa, synthetic construct
QVQLVQSGAEVKKPGSSVKVSCKASGYSFTTYYIHWVRQAPGQGLEWMGWPFPGSGNIKYNEKFKGRVTITADTSTSTAYMELSSLRSEDTAVYYCAGSYYSYDVLDYWGQGTTVTVSSASTKGPSVFPLAPSSKSTSGGTAALGCLVKDYFPEPVTVSWNSGALTSGVHTFPAVLQSSGLYSLSSVVTVPSSSLGTQTYICNVNHKPSNTKVDKKVEPKSC

SEQ ID NO: 737 - protein, 222 aa, synthetic construct
QVQLVQSGAEVKKPGSSVKVSCKASGYSFTTYYIHWVRQAPGQGLEWMGWQFPGSGNIKYNEKFKGRVTITADTSTSTAYMELSSLRSEDTAVYYCAGSYYSYDVLDYWGQGTTVTVSSASTKGPSVFPLAPSSKSTSGGTAALGCLVKDYFPEPVTVSWNSGALTSGVHTFPAVLQSSGLYSLSSVVTVPSSSLGTQTYICNVNHKPSNTKVDKKVEPKSC

SEQ ID NO: 738 - protein, 222 aa, synthetic construct
QVQLVQSGAEVKKPGSSVKVSCKASGYSFTTYYIHWVRQAPGQGLEWMGWRFPGSGNIKYNEKFKGRVTITADTSTSTAYMELSSLRSEDTAVYYCAGSYYSYDVLDYWGQGTTVTVSSASTKGPSVFPLAPSSKSTSGGTAALGCLVKDYFPEPVTVSWNSGALTSGVHTFPAVLQSSGLYSLSSVVTVPSSSLGTQTYICNVNHKPSNTKVDKKVEPKSC

SEQ ID NO: 739 - protein, 222 aa, synthetic construct
QVQLVQSGAEVKKPGSSVKVSCKASGYSFTTYYIHWVRQAPGQGLEWMGWSFPGSGNIKYNEKFKGRVTITADTSTSTAYMELSSLRSEDTAVYYCAGSYYSYDVLDYWGQGTTVTVSSASTKGPSVFPLAPSSKSTSGGTAALGCLVKDYFPEPVTVSWNSGALTSGVHTFPAVLQSSGLYSLSSVVTVPSSSLGTQTYICNVNHKPSNTKVDKKVEPKSC

SEQ ID NO: 740 - protein, 222 aa, synthetic construct
QVQLVQSGAEVKKPGSSVKVSCKASGYSFTTYYIHWVRQAPGQGLEWMGWTFPGSGNIKYNEKFKGRVTITADTSTSTAYMELSSLRSEDTAVYYCAGSYYSYDVLDYWGQGTTVTVSSASTKGPSVFPLAPSSKSTSGGTAALGCLVKDYFPEPVTVSWNSGALTSGVHTFPAVLQSSGLYSLSSVVTVPSSSLGTQTYICNVNHKPSNTKVDKKVEPKSC

SEQ ID NO: 741 - protein, 222 aa, synthetic construct
QVQLVQSGAEVKKPGSSVKVSCKASGYSFTTYYIHWVRQAPGQGLEWMGWVFPGSGNIKYNEKFKGRVTITADTSTSTAYMELSSLRSEDTAVYYCAGSYYSYDVLDYWGQGTTVTVSSASTKGPSVFPLAPSSKSTSGGTAALGCLVKDYFPEPVTVSWNSGALTSGVHTFPAVLQSSGLYSLSSVVTVPSSSLGTQTYICNVNHKPSNTKVDKKVEPKSC

SEQ ID NO: 742 - protein, 222 aa, synthetic construct
QVQLVQSGAEVKKPGSSVKVSCKASGYSFTTYYIHWVRQAPGQGLEWMGWWFPGSGNIKYNEKFKGRVTITADTSTSTAYMELSSLRSEDTAVYYCAGSYYSYDVLDYWGQGTTVTVSSASTKGPSVFPLAPSSKSTSGGTAALGCLVKDYFPEPVTVSWNSGALTSGVHTFPAVLQSSGLYSLSSVVTVPSSSLGTQTYICNVNHKPSNTKVDKKVEPKSC

SEQ ID NO: 743 - protein, 222 aa, synthetic construct
QVQLVQSGAEVKKPGSSVKVSCKASGYSFTTYYIHWVRQAPGQGLEWMGWYFPGSGNIKYNEKFKGRVTITADTSTSTAYMELSSLRSEDTAVYYCAGSYYSYDVLDYWGQGTTVTVSSASTKGPSVFPLAPSSKSTSGGTAALGCLVKDYFPEPVTVSWNSGALTSGVHTFPAVLQSSGLYSLSSVVTVPSSSLGTQTYICNVNHKPSNTKVDKKVEPKSC

SEQ ID NO: 744 - protein, 222 aa, synthetic construct
QVQLVQSGAEVKKPGSSVKVSCKASGYSFTTYYIHWVRQAPGQGLEWMGWFAPGSGNIKYNEKFKGRVTITADTSTSTAYMELSSLRSEDTAVYYCAGSYYSYDVLDYWGQGTTVTVSSASTKGPSVFPLAPSSKSTSGGTAALGCLVKDYFPEPVTVSWNSGALTSGVHTFPAVLQSSGLYSLSSVVTVPSSSLGTQTYICNVNHKPSNTKVDKKVEPKSC

SEQ ID NO: 745 - protein, 222 aa, synthetic construct
QVQLVQSGAEVKKPGSSVKVSCKASGYSFTTYYIHWVRQAPGQGLEWMGWFDPGSGNIKYNEKFKGRVTITADTSTSTAYMELSSLRSEDTAVYYCAGSYYSYDVLDYWGQGTTVTVSSASTKGPSVFPLAPSSKSTSGGTAALGCLVKDYFPEPVTVSWNSGALTSGVHTFPAVLQSSGLYSLSSVVTVPSSSLGTQTYICNVNHKPSNTKVDKKVEPKSC

SEQ ID NO: 746 - protein, 222 aa, synthetic construct
QVQLVQSGAEVKKPGSSVKVSCKASGYSFTTYYIHWVRQAPGQGLEWMGWFEPGSGNIKYNEKFKGRVTITADTSTSTAYMELSSLRSEDTAVYYCAGSYYSYDVLDYWGQGTTVTVSSASTKGPSVFPLAPSSKSTSGGTAALGCLVKDYFPEPVTVSWNSGALTSGVHTFPAVLQSSGLYSLSSVVTVPSSSLGTQTYICNVNHKPSNTKVDKKVEPKSC

SEQ ID NO: 747 - protein, 222 aa, synthetic construct
QVQLVQSGAEVKKPGSSVKVSCKASGYSFTTYYIHWVRQAPGQGLEWMGWFGPGSGNIKYNEKFKGRVTITADTSTSTAYMELSSLRSEDTAVYYCAGSYYSYDVLDYWGQGTTVTVSSASTKGPSVFPLAPSSKSTSGGTAALGCLVKDYFPEPVTVSWNSGALTSGVHTFPAVLQSSGLYSLSSVVTVPSSSLGTQTYICNVNHKPSNTKVDKKVEPKSC

SEQ ID NO: 748 - protein, 222 aa, synthetic construct
QVQLVQSGAEVKKPGSSVKVSCKASGYSFTTYYIHWVRQAPGQGLEWMGWFHPGSGNIKYNEKFKGRVTITADTSTSTAYMELSSLRSEDTAVYYCAGSYYSYDVLDYWGQGTTVTVSSASTKGPSVFPLAPSSKSTSGGTAALGCLVKDYFPEPVTVSWNSGALTSGVHTFPAVLQSSGLYSLSSVVTVPSSSLGTQTYICNVNHKPSNTKVDKKVEPKSC

SEQ ID NO: 749 - protein, 222 aa, synthetic construct
QVQLVQSGAEVKKPGSSVKVSCKASGYSFTTYYIHWVRQAPGQGLEWMGWFIPGSGNIKYNEKFKGRVTITADTSTSTAYMELSSLRSEDTAVYYCAGSYYSYDVLDYWGQGTTVTVSSASTKGPSVFPLAPSSKSTSGGTAALGCLVKDYFPEPVTVSWNSGALTSGVHTFPAVLQSSGLYSLSSVVTVPSSSLGTQTYICNVNHKPSNTKVDKKVEPKSC

SEQ ID NO: 750 - protein, 222 aa, synthetic construct
QVQLVQSGAEVKKPGSSVKVSCKASGYSFTTYYIHWVRQAPGQGLEWMGWFKPGSGNIKYNEKFKGRVTITADTSTSTAYMELSSLRSEDTAVYYCAGSYYSYDVLDYWGQGTTVTVSSASTKGPSVFPLAPSSKSTSGGTAALGCLVKDYFPEPVTVSWNSGALTSGVHTFPAVLQSSGLYSLSSVVTVPSSSLGTQTYICNVNHKPSNTKVDKKVEPKSC

SEQ ID NO: 751 - protein, 222 aa, synthetic construct
QVQLVQSGAEVKKPGSSVKVSCKASGYSFTTYYIHWVRQAPGQGLEWMGWFLPGSGNIKYNEKFKGRVTITADTSTSTAYMELSSLRSEDTAVYYCAGSYYSYDVLDYWGQGTTVTVSSASTKGPSVFPLAPSSKSTSGGTAALGCLVKDYFPEPVTVSWNSGALTSGVHTFPAVLQSSGLYSLSSVVTVPSSSLGTQTYICNVNHKPSNTKVDKKVEPKSC

SEQ ID NO: 752 - protein, 222 aa, synthetic construct
QVQLVQSGAEVKKPGSSVKVSCKASGYSFTTYYIHWVRQAPGQGLEWMGWFMPGSGNIKYNEKFKGRVTITADTSTSTAYMELSSLRSEDTAVYYCAGSYYSYDVLDYWGQGTTVTVSSASTKGPSVFPLAPSSKSTSGGTAALGCLVKDYFPEPVTVSWNSGALTSGVHTFPAVLQSSGLYSLSSVVTVPSSSLGTQTYICNVNHKPSNTKVDKKVEPKSC

SEQ ID NO: 753 - protein, 222 aa, synthetic construct
QVQLVQSGAEVKKPGSSVKVSCKASGYSFTTYYIHWVRQAPGQGLEWMGWFNPGSGNIKYNEKFKGRVTITADTSTSTAYMELSSLRSEDTAVYYCAGSYYSYDVLDYWGQGTTVTVSSASTKGPSVFPLAPSSKSTSGGTAALGCLVKDYFPEPVTVSWNSGALTSGVHTFPAVLQSSGLYSLSSVVTVPSSSLGTQTYICNVNHKPSNTKVDKKVEPKSC

SEQ ID NO: 754 - protein, 222 aa, synthetic construct
QVQLVQSGAEVKKPGSSVKVSCKASGYSFTTYYIHWVRQAPGQGLEWMGWFPPGSGNIKYNEKFKGRVTITADTSTSTAYMELSSLRSEDTAVYYCAGSYYSYDVLDYWGQGTTVTVSSASTKGPSVFPLAPSSKSTSGGTAALGCLVKDYFPEPVTVSWNSGALTSGVHTFPAVLQSSGLYSLSSVVTVPSSSLGTQTYICNVNHKPSNTKVDKKVEPKSC

SEQ ID NO: 755 - protein, 222 aa, synthetic construct
QVQLVQSGAEVKKPGSSVKVSCKASGYSFTTYYIHWVRQAPGQGLEWMGWFQPGSGNIKYNEKFKGRVTITADTSTSTAYMELSSLRSEDTAVYYCAGSYYSYDVLDYWGQGTTVTVSSASTKGPSVFPLAPSSKSTSGGTAALGCLVKDYFPEPVTVSWNSGALTSGVHTFPAVLQSSGLYSLSSVVTVPSSSLGTQTYICNVNHKPSNTKVDKKVEPKSC

SEQ ID NO: 756 - protein, 222 aa, synthetic construct
QVQLVQSGAEVKKPGSSVKVSCKASGYSFTTYYIHWVRQAPGQGLEWMGWFRPGSGNIKYNEKFKGRVTITADTSTSTAYMELSSLRSEDTAVYYCAGSYYSYDVLDYWGQGTTVTVSSASTKGPSVFPLAPSSKSTSGGTAALGCLVKDYFPEPVTVSWNSGALTSGVHTFPAVLQSSGLYSLSSVVTVPSSSLGTQTYICNVNHKPSNTKVDKKVEPKSC

SEQ ID NO: 757 - protein, 222 aa, synthetic construct
QVQLVQSGAEVKKPGSSVKVSCKASGYSFTTYYIHWVRQAPGQGLEWMGWFSPGSGNIKYNEKFKGRVTITADTSTSTAYMELSSLRSEDTAVYYCAGSYYSYDVLDYWGQGTTVTVSSASTKGPSVFPLAPSSKSTSGGTAALGCLVKDYFPEPVTVSWNSGALTSGVHTFPAVLQSSGLYSLSSVVTVPSSSLGTQTYICNVNHKPSNTKVDKKVEPKSC

SEQ ID NO: 758 - protein, 222 aa, synthetic construct
QVQLVQSGAEVKKPGSSVKVSCKASGYSFTTYYIHWVRQAPGQGLEWMGWFTPGSGNIKYNEKFKGRVTITADTSTSTAYMELSSLRSEDTAVYYCAGSYYSYDVLDYWGQGTTVTVSSASTKGPSVFPLAPSSKSTSGGTAALGCLVKDYFPEPVTVSWNSGALTSGVHTFPAVLQSSGLYSLSSVVTVPSSSLGTQTYICNVNHKPSNTKVDKKVEPKSC

SEQ ID NO: 759 - protein, 222 aa, synthetic construct
QVQLVQSGAEVKKPGSSVKVSCKASGYSFTTYYIHWVRQAPGQGLEWMGWFVPGSGNIKYNEKFKGRVTITADTSTSTAYMELSSLRSEDTAVYYCAGSYYSYDVLDYWGQGTTVTVSSASTKGPSVFPLAPSSKSTSGGTAALGCLVKDYFPEPVTVSWNSGALTSGVHTFPAVLQSSGLYSLSSVVTVPSSSLGTQTYICNVNHKPSNTKVDKKVEPKSC

SEQ ID NO: 760 - protein, 222 aa, synthetic construct
QVQLVQSGAEVKKPGSSVKVSCKASGYSFTTYYIHWVRQAPGQGLEWMGWFWPGSGNIKYNEKFKGRVTITADTSTSTAYMELSSLRSEDTAVYYCAGSYYSYDVLDYWGQGTTVTVSSASTKGPSVFPLAPSSKSTSGGTAALGCLVKDYFPEPVTVSWNSGALTSGVHTFPAVLQSSGLYSLSSVVTVPSSSLGTQTYICNVNHKPSNTKVDKKVEPKSC

SEQ ID NO: 761 - protein, 222 aa, synthetic construct
QVQLVQSGAEVKKPGSSVKVSCKASGYSFTTYYIHWVRQAPGQGLEWMGWFYPGSGNIKYNEKFKGRVTITADTSTSTAYMELSSLRSEDTAVYYCAGSYYSYDVLDYWGQGTTVTVSSASTKGPSVFPLAPSSKSTSGGTAALGCLVKDYFPEPVTVSWNSGALTSGVHTFPAVLQSSGLYSLSSVVTVPSSSLGTQTYICNVNHKPSNTKVDKKVEPKSC

SEQ ID NO: 762 - protein, 222 aa, synthetic construct
QVQLVQSGAEVKKPGSSVKVSCKASGYSFTTYYIHWVRQAPGQGLEWMGWFFAGSGNIKYNEKFKGRVTITADTSTSTAYMELSSLRSEDTAVYYCAGSYYSYDVLDYWGQGTTVTVSSASTKGPSVFPLAPSSKSTSGGTAALGCLVKDYFPEPVTVSWNSGALTSGVHTFPAVLQSSGLYSLSSVVTVPSSSLGTQTYICNVNHKPSNTKVDKKVEPKSC

SEQ ID NO: 763 - protein, 222 aa, synthetic construct
QVQLVQSGAEVKKPGSSVKVSCKASGYSFTTYYIHWVRQAPGQGLEWMGWFFDGSGNIKYNEKFKGRVTITADTSTSTAYMELSSLRSEDTAVYYCAGSYYSYDVLDYWGQGTTVTVSSASTKGPSVFPLAPSSKSTSGGTAALGCLVKDYFPEPVTVSWNSGALTSGVHTFPAVLQSSGLYSLSSVVTVPSSSLGTQTYICNVNHKPSNTKVDKKVEPKSC

SEQ ID NO: 764 - protein, 222 aa, synthetic construct
QVQLVQSGAEVKKPGSSVKVSCKASGYSFTTYYIHWVRQAPGQGLEWMGWFFEGSGNIKYNEKFKGRVTITADTSTSTAYMELSSLRSEDTAVYYCAGSYYSYDVLDYWGQGTTVTVSSASTKGPSVFPLAPSSKSTSGGTAALGCLVKDYFPEPVTVSWNSGALTSGVHTFPAVLQSSGLYSLSSVVTVPSSSLGTQTYICNVNHKPSNTKVDKKVEPKSC

SEQ ID NO: 765 - protein, 222 aa, synthetic construct
QVQLVQSGAEVKKPGSSVKVSCKASGYSFTTYYIHWVRQAPGQGLEWMGWFFFGSGNIKYNEKFKGRVTITADTSTSTAYMELSSLRSEDTAVYYCAGSYYSYDVLDYWGQGTTVTVSSASTKGPSVFPLAPSSKSTSGGTAALGCLVKDYFPEPVTVSWNSGALTSGVHTFPAVLQSSGLYSLSSVVTVPSSSLGTQTYICNVNHKPSNTKVDKKVEPKSC

SEQ ID NO: 766 - protein, 222 aa, synthetic construct
QVQLVQSGAEVKKPGSSVKVSCKASGYSFTTYYIHWVRQAPGQGLEWMGWFFGGSGNIKYNEKFKGRVTITADTSTSTAYMELSSLRSEDTAVYYCAGSYYSYDVLDYWGQGTTVTVSSASTKGPSVFPLAPSSKSTSGGTAALGCLVKDYFPEPVTVSWNSGALTSGVHTFPAVLQSSGLYSLSSVVTVPSSSLGTQTYICNVNHKPSNTKVDKKVEPKSC

SEQ ID NO: 767 - protein, 222 aa, synthetic construct
QVQLVQSGAEVKKPGSSVKVSCKASGYSFTTYYIHWVRQAPGQGLEWMGWFFIGSGNIKYNEKFKGRVTITADTSTSTAYMELSSLRSEDTAVYYCAGSYYSYDVLDYWGQGTTVTVSSASTKGPSVFPLAPSSKSTSGGTAALGCLVKDYFPEPVTVSWNSGALTSGVHTFPAVLQSSGLYSLSSVVTVPSSSLGTQTYICNVNHKPSNTKVDKKVEPKSC

SEQ ID NO: 768 - protein, 222 aa, synthetic construct
QVQLVQSGAEVKKPGSSVKVSCKASGYSFTTYYIHWVRQAPGQGLEWMGWFFKGSGNIKYNEKFKGRVTITADTSTSTAYMELSSLRSEDTAVYYCAGSYYSYDVLDYWGQGTTVTVSSASTKGPSVFPLAPSSKSTSGGTAALGCLVKDYFPEPVTVSWNSGALTSGVHTFPAVLQSSGLYSLSSVVTVPSSSLGTQTYICNVNHKPSNTKVDKKVEPKSC

SEQ ID NO: 769 - protein, 222 aa, synthetic construct
QVQLVQSGAEVKKPGSSVKVSCKASGYSFTTYYIHWVRQAPGQGLEWMGWFFLGSGNIKYNEKFKGRVTITADTSTSTAYMELSSLRSEDTAVYYCAGSYYSYDVLDYWGQGTTVTVSSASTKGPSVFPLAPSSKSTSGGTAALGCLVKDYFPEPVTVSWNSGALTSGVHTFPAVLQSSGLYSLSSVVTVPSSSLGTQTYICNVNHKPSNTKVDKKVEPKSC

SEQ ID NO: 770 - protein, 222 aa, synthetic construct
QVQLVQSGAEVKKPGSSVKVSCKASGYSFTTYYIHWVRQAPGQGLEWMGWFFNGSGNIKYNEKFKGRVTITADTSTSTAYMELSSLRSEDTAVYYCAGSYYSYDVLDYWGQGTTVTVSSASTKGPSVFPLAPSSKSTSGGTAALGCLVKDYFPEPVTVSWNSGALTSGVHTFPAVLQSSGLYSLSSVVTVPSSSLGTQTYICNVNHKPSNTKVDKKVEPKSC

SEQ ID NO: 771 - protein, 222 aa, synthetic construct
QVQLVQSGAEVKKPGSSVKVSCKASGYSFTTYYIHWVRQAPGQGLEWMGWFFQGSGNIKYNEKFKGRVTITADTSTSTAYMELSSLRSEDTAVYYCAGSYYSYDVLDYWGQGTTVTVSSASTKGPSVFPLAPSSKSTSGGTAALGCLVKDYFPEPVTVSWNSGALTSGVHTFPAVLQSSGLYSLSSVVTVPSSSLGTQTYICNVNHKPSNTKVDKKVEPKSC

SEQ ID NO: 772 - protein, 222 aa, synthetic construct
QVQLVQSGAEVKKPGSSVKVSCKASGYSFTTYYIHWVRQAPGQGLEWMGWFFRGSGNIKYNEKFKGRVTITADTSTSTAYMELSSLRSEDTAVYYCAGSYYSYDVLDYWGQGTTVTVSSASTKGPSVFPLAPSSKSTSGGTAALGCLVKDYFPEPVTVSWNSGALTSGVHTFPAVLQSSGLYSLSSVVTVPSSSLGTQTYICNVNHKPSNTKVDKKVEPKSC

SEQ ID NO: 773 - protein, 222 aa, synthetic construct
QVQLVQSGAEVKKPGSSVKVSCKASGYSFTTYYIHWVRQAPGQGLEWMGWFFSGSGNIKYNEKFKGRVTITADTSTSTAYMELSSLRSEDTAVYYCAGSYYSYDVLDYWGQGTTVTVSSASTKGPSVFPLAPSSKSTSGGTAALGCLVKDYFPEPVTVSWNSGALTSGVHTFPAVLQSSGLYSLSSVVTVPSSSLGTQTYICNVNHKPSNTKVDKKVEPKSC

SEQ ID NO: 774 - protein, 222 aa, synthetic construct
QVQLVQSGAEVKKPGSSVKVSCKASGYSFTTYYIHWVRQAPGQGLEWMGWFFTGSGNIKYNEKFKGRVTITADTSTSTAYMELSSLRSEDTAVYYCAGSYYSYDVLDYWGQGTTVTVSSASTKGPSVFPLAPSSKSTSGGTAALGCLVKDYFPEPVTVSWNSGALTSGVHTFPAVLQSSGLYSLSSVVTVPSSSLGTQTYICNVNHKPSNTKVDKKVEPKSC

SEQ ID NO: 775 - protein, 222 aa, synthetic construct
QVQLVQSGAEVKKPGSSVKVSCKASGYSFTTYYIHWVRQAPGQGLEWMGWFFVGSGNIKYNEKFKGRVTITADTSTSTAYMELSSLRSEDTAVYYCAGSYYSYDVLDYWGQGTTVTVSSASTKGPSVFPLAPSSKSTSGGTAALGCLVKDYFPEPVTVSWNSGALTSGVHTFPAVLQSSGLYSLSSVVTVPSSSLGTQTYICNVNHKPSNTKVDKKVEPKSC

SEQ ID NO: 776 - protein, 222 aa, synthetic construct
QVQLVQSGAEVKKPGSSVKVSCKASGYSFTTYYIHWVRQAPGQGLEWMGWFFWGSGNIKYNEKFKGRVTITADTSTSTAYMELSSLRSEDTAVYYCAGSYYSYDVLDYWGQGTTVTVSSASTKGPSVFPLAPSSKSTSGGTAALGCLVKDYFPEPVTVSWNSGALTSGVHTFPAVLQSSGLYSLSSVVTVPSSSLGTQTYICNVNHKPSNTKVDKKVEPKSC

SEQ ID NO: 777 - protein, 222 aa, synthetic construct
QVQLVQSGAEVKKPGSSVKVSCKASGYSFTTYYIHWVRQAPGQGLEWMGWFFYGSGNIKYNEKFKGRVTITADTSTSTAYMELSSLRSEDTAVYYCAGSYYSYDVLDYWGQGTTVTVSSASTKGPSVFPLAPSSKSTSGGTAALGCLVKDYFPEPVTVSWNSGALTSGVHTFPAVLQSSGLYSLSSVVTVPSSSLGTQTYICNVNHKPSNTKVDKKVEPKSC

SEQ ID NO: 778 - protein, 222 aa, synthetic construct
QVQLVQSGAEVKKPGSSVKVSCKASGYSFTTYYIHWVRQAPGQGLEWMGWFFPDSGNIKYNEKFKGRVTITADTSTSTAYMELSSLRSEDTAVYYCAGSYYSYDVLDYWGQGTTVTVSSASTKGPSVFPLAPSSKSTSGGTAALGCLVKDYFPEPVTVSWNSGALTSGVHTFPAVLQSSGLYSLSSVVTVPSSSLGTQTYICNVNHKPSNTKVDKKVEPKSC

SEQ ID NO: 779 - protein, 222 aa, synthetic construct
QVQLVQSGAEVKKPGSSVKVSCKASGYSFTTYYIHWVRQAPGQGLEWMGWFFPFSGNIKYNEKFKGRVTITADTSTSTAYMELSSLRSEDTAVYYCAGSYYSYDVLDYWGQGTTVTVSSASTKGPSVFPLAPSSKSTSGGTAALGCLVKDYFPEPVTVSWNSGALTSGVHTFPAVLQSSGLYSLSSVVTVPSSSLGTQTYICNVNHKPSNTKVDKKVEPKSC

SEQ ID NO: 780 - protein, 222 aa, synthetic construct
QVQLVQSGAEVKKPGSSVKVSCKASGYSFTTYYIHWVRQAPGQGLEWMGWFFPHSGNIKYNEKFKGRVTITADTSTSTAYMELSSLRSEDTAVYYCAGSYYSYDVLDYWGQGTTVTVSSASTKGPSVFPLAPSSKSTSGGTAALGCLVKDYFPEPVTVSWNSGALTSGVHTFPAVLQSSGLYSLSSVVTVPSSSLGTQTYICNVNHKPSNTKVDKKVEPKSC

SEQ ID NO: 781 - protein, 222 aa, synthetic construct
QVQLVQSGAEVKKPGSSVKVSCKASGYSFTTYYIHWVRQAPGQGLEWMGWFFPISGNIKYNEKFKGRVTITADTSTSTAYMELSSLRSEDTAVYYCAGSYYSYDVLDYWGQGTTVTVSSASTKGPSVFPLAPSSKSTSGGTAALGCLVKDYFPEPVTVSWNSGALTSGVHTFPAVLQSSGLYSLSSVVTVPSSSLGTQTYICNVNHKPSNTKVDKKVEPKSC

SEQ ID NO: 782 - protein, 222 aa, synthetic construct
QVQLVQSGAEVKKPGSSVKVSCKASGYSFTTYYIHWVRQAPGQGLEWMGWFFPKSGNIKYNEKFKGRVTITADTSTSTAYMELSSLRSEDTAVYYCAGSYYSYDVLDYWGQGTTVTVSSASTKGPSVFPLAPSSKSTSGGTAALGCLVKDYFPEPVTVSWNSGALTSGVHTFPAVLQSSGLYSLSSVVTVPSSSLGTQTYICNVNHKPSNTKVDKKVEPKSC

SEQ ID NO: 783 - protein, 222 aa, synthetic construct
QVQLVQSGAEVKKPGSSVKVSCKASGYSFTTYYIHWVRQAPGQGLEWMGWFFPLSGNIKYNEKFKGRVTITADTSTSTAYMELSSLRSEDTAVYYCAGSYYSYDVLDYWGQGTTVTVSSASTKGPSVFPLAPSSKSTSGGTAALGCLVKDYFPEPVTVSWNSGALTSGVHTFPAVLQSSGLYSLSSVVTVPSSSLGTQTYICNVNHKPSNTKVDKKVEPKSC

SEQ ID NO: 784 - protein, 222 aa, synthetic construct
QVQLVQSGAEVKKPGSSVKVSCKASGYSFTTYYIHWVRQAPGQGLEWMGWFFPMSGNIKYNEKFKGRVTITADTSTSTAYMELSSLRSEDTAVYYCAGSYYSYDVLDYWGQGTTVTVSSASTKGPSVFPLAPSSKSTSGGTAALGCLVKDYFPEPVTVSWNSGALTSGVHTFPAVLQSSGLYSLSSVVTVPSSSLGTQTYICNVNHKPSNTKVDKKVEPKSC

SEQ ID NO: 785 - protein, 222 aa, synthetic construct
QVQLVQSGAEVKKPGSSVKVSCKASGYSFTTYYIHWVRQAPGQGLEWMGWFFPPSGNIKYNEKFKGRVTITADTSTSTAYMELSSLRSEDTAVYYCAGSYYSYDVLDYWGQGTTVTVSSASTKGPSVFPLAPSSKSTSGGTAALGCLVKDYFPEPVTVSWNSGALTSGVHTFPAVLQSSGLYSLSSVVTVPSSSLGTQTYICNVNHKPSNTKVDKKVEPKSC

SEQ ID NO: 786 - protein, 222 aa, synthetic construct
QVQLVQSGAEVKKPGSSVKVSCKASGYSFTTYYIHWVRQAPGQGLEWMGWFFPQSGNIKYNEKFKGRVTITADTSTSTAYMELSSLRSEDTAVYYCAGSYYSYDVLDYWGQGTTVTVSSASTKGPSVFPLAPSSKSTSGGTAALGCLVKDYFPEPVTVSWNSGALTSGVHTFPAVLQSSGLYSLSSVVTVPSSSLGTQTYICNVNHKPSNTKVDKKVEPKSC

SEQ ID NO: 787 - protein, 222 aa, synthetic construct
QVQLVQSGAEVKKPGSSVKVSCKASGYSFTTYYIHWVRQAPGQGLEWMGWFFPRSGNIKYNEKFKGRVTITADTSTSTAYMELSSLRSEDTAVYYCAGSYYSYDVLDYWGQGTTVTVSSASTKGPSVFPLAPSSKSTSGGTAALGCLVKDYFPEPVTVSWNSGALTSGVHTFPAVLQSSGLYSLSSVVTVPSSSLGTQTYICNVNHKPSNTKVDKKVEPKSC

SEQ ID NO: 788 - protein, 222 aa, synthetic construct
QVQLVQSGAEVKKPGSSVKVSCKASGYSFTTYYIHWVRQAPGQGLEWMGWFFPSSGNIKYNEKFKGRVTITADTSTSTAYMELSSLRSEDTAVYYCAGSYYSYDVLDYWGQGTTVTVSSASTKGPSVFPLAPSSKSTSGGTAALGCLVKDYFPEPVTVSWNSGALTSGVHTFPAVLQSSGLYSLSSVVTVPSSSLGTQTYICNVNHKPSNTKVDKKVEPKSC

SEQ ID NO: 789 - protein, 222 aa, synthetic construct
QVQLVQSGAEVKKPGSSVKVSCKASGYSFTTYYIHWVRQAPGQGLEWMGWFFPTSGNIKYNEKFKGRVTITADTSTSTAYMELSSLRSEDTAVYYCAGSYYSYDVLDYWGQGTTVTVSSASTKGPSVFPLAPSSKSTSGGTAALGCLVKDYFPEPVTVSWNSGALTSGVHTFPAVLQSSGLYSLSSVVTVPSSSLGTQTYICNVNHKPSNTKVDKKVEPKSC

SEQ ID NO: 790 - protein, 222 aa, synthetic construct
QVQLVQSGAEVKKPGSSVKVSCKASGYSFTTYYIHWVRQAPGQGLEWMGWFFPVSGNIKYNEKFKGRVTITADTSTSTAYMELSSLRSEDTAVYYCAGSYYSYDVLDYWGQGTTVTVSSASTKGPSVFPLAPSSKSTSGGTAALGCLVKDYFPEPVTVSWNSGALTSGVHTFPAVLQSSGLYSLSSVVTVPSSSLGTQTYICNVNHKPSNTKVDKKVEPKSC

SEQ ID NO: 791 - protein, 222 aa, synthetic construct
QVQLVQSGAEVKKPGSSVKVSCKASGYSFTTYYIHWVRQAPGQGLEWMGWFFPWSGNIKYNEKFKGRVTITADTSTSTAYMELSSLRSEDTAVYYCAGSYYSYDVLDYWGQGTTVTVSSASTKGPSVFPLAPSSKSTSGGTAALGCLVKDYFPEPVTVSWNSGALTSGVHTFPAVLQSSGLYSLSSVVTVPSSSLGTQTYICNVNHKPSNTKVDKKVEPKSC

SEQ ID NO: 792 - protein, 222 aa, synthetic construct
QVQLVQSGAEVKKPGSSVKVSCKASGYSFTTYYIHWVRQAPGQGLEWMGWFFPYSGNIKYNEKFKGRVTITADTSTSTAYMELSSLRSEDTAVYYCAGSYYSYDVLDYWGQGTTVTVSSASTKGPSVFPLAPSSKSTSGGTAALGCLVKDYFPEPVTVSWNSGALTSGVHTFPAVLQSSGLYSLSSVVTVPSSSLGTQTYICNVNHKPSNTKVDKKVEPKSC

SEQ ID NO: 793 - protein, 222 aa, synthetic construct
QVQLVQSGAEVKKPGSSVKVSCKASGYSFTTYYIHWVRQAPGQGLEWMGWFFPGAGNIKYNEKFKGRVTITADTSTSTAYMELSSLRSEDTAVYYCAGSYYSYDVLDYWGQGTTVTVSSASTKGPSVFPLAPSSKSTSGGTAALGCLVKDYFPEPVTVSWNSGALTSGVHTFPAVLQSSGLYSLSSVVTVPSSSLGTQTYICNVNHKPSNTKVDKKVEPKSC

SEQ ID NO: 794 - protein, 222 aa, synthetic construct
QVQLVQSGAEVKKPGSSVKVSCKASGYSFTTYYIHWVRQAPGQGLEWMGWFFPGDGNIKYNEKFKGRVTITADTSTSTAYMELSSLRSEDTAVYYCAGSYYSYDVLDYWGQGTTVTVSSASTKGPSVFPLAPSSKSTSGGTAALGCLVKDYFPEPVTVSWNSGALTSGVHTFPAVLQSSGLYSLSSVVTVPSSSLGTQTYICNVNHKPSNTKVDKKVEPKSC

SEQ ID NO: 795 - protein, 222 aa, synthetic construct
QVQLVQSGAEVKKPGSSVKVSCKASGYSFTTYYIHWVRQAPGQGLEWMGWFFPGEGNIKYNEKFKGRVTITADTSTSTAYMELSSLRSEDTAVYYCAGSYYSYDVLDYWGQGTTVTVSSASTKGPSVFPLAPSSKSTSGGTAALGCLVKDYFPEPVTVSWNSGALTSGVHTFPAVLQSSGLYSLSSVVTVPSSSLGTQTYICNVNHKPSNTKVDKKVEPKSC

SEQ ID NO: 796 - protein, 222 aa, synthetic construct
QVQLVQSGAEVKKPGSSVKVSCKASGYSFTTYYIHWVRQAPGQGLEWMGWFFPGFGNIKYNEKFKGRVTITADTSTSTAYMELSSLRSEDTAVYYCAGSYYSYDVLDYWGQGTTVTVSSASTKGPSVFPLAPSSKSTSGGTAALGCLVKDYFPEPVTVSWNSGALTSGVHTFPAVLQSSGLYSLSSVVTVPSSSLGTQTYICNVNHKPSNTKVDKKVEPKSC

SEQ ID NO: 797 - protein, 222 aa, synthetic construct
QVQLVQSGAEVKKPGSSVKVSCKASGYSFTTYYIHWVRQAPGQGLEWMGWFFPGGGNIKYNEKFKGRVTITADTSTSTAYMELSSLRSEDTAVYYCAGSYYSYDVLDYWGQGTTVTVSSASTKGPSVFPLAPSSKSTSGGTAALGCLVKDYFPEPVTVSWNSGALTSGVHTFPAVLQSSGLYSLSSVVTVPSSSLGTQTYICNVNHKPSNTKVDKKVEPKSC

SEQ ID NO: 798 - protein, 222 aa, synthetic construct
QVQLVQSGAEVKKPGSSVKVSCKASGYSFTTYYIHWVRQAPGQGLEWMGWFFPGHGNIKYNEKFKGRVTITADTSTSTAYMELSSLRSEDTAVYYCAGSYYSYDVLDYWGQGTTVTVSSASTKGPSVFPLAPSSKSTSGGTAALGCLVKDYFPEPVTVSWNSGALTSGVHTFPAVLQSSGLYSLSSVVTVPSSSLGTQTYICNVNHKPSNTKVDKKVEPKSC

SEQ ID NO: 799 - protein, 222 aa, synthetic construct
QVQLVQSGAEVKKPGSSVKVSCKASGYSFTTYYIHWVRQAPGQGLEWMGWFFPGKGNIKYNEKFKGRVTITADTSTSTAYMELSSLRSEDTAVYYCAGSYYSYDVLDYWGQGTTVTVSSASTKGPSVFPLAPSSKSTSGGTAALGCLVKDYFPEPVTVSWNSGALTSGVHTFPAVLQSSGLYSLSSVVTVPSSSLGTQTYICNVNHKPSNTKVDKKVEPKSC

SEQ ID NO: 800 - protein, 222 aa, synthetic construct
QVQLVQSGAEVKKPGSSVKVSCKASGYSFTTYYIHWVRQAPGQGLEWMGWFFPGLGNIKYNEKFKGRVTITADTSTSTAYMELSSLRSEDTAVYYCAGSYYSYDVLDYWGQGTTVTVSSASTKGPSVFPLAPSSKSTSGGTAALGCLVKDYFPEPVTVSWNSGALTSGVHTFPAVLQSSGLYSLSSVVTVPSSSLGTQTYICNVNHKPSNTKVDKKVEPKSC

SEQ ID NO: 801 - protein, 222 aa, synthetic construct
QVQLVQSGAEVKKPGSSVKVSCKASGYSFTTYYIHWVRQAPGQGLEWMGWFFPGMGNIKYNEKFKGRVTITADTSTSTAYMELSSLRSEDTAVYYCAGSYYSYDVLDYWGQGTTVTVSSASTKGPSVFPLAPSSKSTSGGTAALGCLVKDYFPEPVTVSWNSGALTSGVHTFPAVLQSSGLYSLSSVVTVPSSSLGTQTYICNVNHKPSNTKVDKKVEPKSC

SEQ ID NO: 802 - protein, 222 aa, synthetic construct
QVQLVQSGAEVKKPGSSVKVSCKASGYSFTTYYIHWVRQAPGQGLEWMGWFFPGNGNIKYNEKFKGRVTITADTSTSTAYMELSSLRSEDTAVYYCAGSYYSYDVLDYWGQGTTVTVSSASTKGPSVFPLAPSSKSTSGGTAALGCLVKDYFPEPVTVSWNSGALTSGVHTFPAVLQSSGLYSLSSVVTVPSSSLGTQTYICNVNHKPSNTKVDKKVEPKSC

SEQ ID NO: 803 - protein, 222 aa, synthetic construct
QVQLVQSGAEVKKPGSSVKVSCKASGYSFTTYYIHWVRQAPGQGLEWMGWFFPGPGNIKYNEKFKGRVTITADTSTSTAYMELSSLRSEDTAVYYCAGSYYSYDVLDYWGQGTTVTVSSASTKGPSVFPLAPSSKSTSGGTAALGCLVKDYFPEPVTVSWNSGALTSGVHTFPAVLQSSGLYSLSSVVTVPSSSLGTQTYICNVNHKPSNTKVDKKVEPKSC

SEQ ID NO: 804 - protein, 222 aa, synthetic construct
QVQLVQSGAEVKKPGSSVKVSCKASGYSFTTYYIHWVRQAPGQGLEWMGWFFPGQGNIKYNEKFKGRVTITADTSTSTAYMELSSLRSEDTAVYYCAGSYYSYDVLDYWGQGTTVTVSSASTKGPSVFPLAPSSKSTSGGTAALGCLVKDYFPEPVTVSWNSGALTSGVHTFPAVLQSSGLYSLSSVVTVPSSSLGTQTYICNVNHKPSNTKVDKKVEPKSC

SEQ ID NO: 805 - protein, 222 aa, synthetic construct
QVQLVQSGAEVKKPGSSVKVSCKASGYSFTTYYIHWVRQAPGQGLEWMGWFFPGRGNIKYNEKFKGRVTITADTSTSTAYMELSSLRSEDTAVYYCAGSYYSYDVLDYWGQGTTVTVSSASTKGPSVFPLAPSSKSTSGGTAALGCLVKDYFPEPVTVSWNSGALTSGVHTFPAVLQSSGLYSLSSVVTVPSSSLGTQTYICNVNHKPSNTKVDKKVEPKSC

SEQ ID NO: 806 - protein, 222 aa, synthetic construct
QVQLVQSGAEVKKPGSSVKVSCKASGYSFTTYYIHWVRQAPGQGLEWMGWFFPGTGNIKYNEKFKGRVTITADTSTSTAYMELSSLRSEDTAVYYCAGSYYSYDVLDYWGQGTTVTVSSASTKGPSVFPLAPSSKSTSGGTAALGCLVKDYFPEPVTVSWNSGALTSGVHTFPAVLQSSGLYSLSSVVTVPSSSLGTQTYICNVNHKPSNTKVDKKVEPKSC

SEQ ID NO: 807 - protein, 222 aa, synthetic construct
QVQLVQSGAEVKKPGSSVKVSCKASGYSFTTYYIHWVRQAPGQGLEWMGWFFPGVGNIKYNEKFKGRVTITADTSTSTAYMELSSLRSEDTAVYYCAGSYYSYDVLDYWGQGTTVTVSSASTKGPSVFPLAPSSKSTSGGTAALGCLVKDYFPEPVTVSWNSGALTSGVHTFPAVLQSSGLYSLSSVVTVPSSSLGTQTYICNVNHKPSNTKVDKKVEPKSC

SEQ ID NO: 808 - protein, 222 aa, synthetic construct
QVQLVQSGAEVKKPGSSVKVSCKASGYSFTTYYIHWVRQAPGQGLEWMGWFFPGWGNIKYNEKFKGRVTITADTSTSTAYMELSSLRSEDTAVYYCAGSYYSYDVLDYWGQGTTVTVSSASTKGPSVFPLAPSSKSTSGGTAALGCLVKDYFPEPVTVSWNSGALTSGVHTFPAVLQSSGLYSLSSVVTVPSSSLGTQTYICNVNHKPSNTKVDKKVEPKSC

SEQ ID NO: 809 - protein, 222 aa, synthetic construct
QVQLVQSGAEVKKPGSSVKVSCKASGYSFTTYYIHWVRQAPGQGLEWMGWFFPGYGNIKYNEKFKGRVTITADTSTSTAYMELSSLRSEDTAVYYCAGSYYSYDVLDYWGQGTTVTVSSASTKGPSVFPLAPSSKSTSGGTAALGCLVKDYFPEPVTVSWNSGALTSGVHTFPAVLQSSGLYSLSSVVTVPSSSLGTQTYICNVNHKPSNTKVDKKVEPKSC

SEQ ID NO: 810 - protein, 222 aa, synthetic construct
QVQLVQSGAEVKKPGSSVKVSCKASGYSFTTYYIHWVRQAPGQGLEWMGWFFPGSANIKYNEKFKGRVTITADTSTSTAYMELSSLRSEDTAVYYCAGSYYSYDVLDYWGQGTTVTVSSASTKGPSVFPLAPSSKSTSGGTAALGCLVKDYFPEPVTVSWNSGALTSGVHTFPAVLQSSGLYSLSSVVTVPSSSLGTQTYICNVNHKPSNTKVDKKVEPKSC

SEQ ID NO: 811 - protein, 222 aa, synthetic construct
QVQLVQSGAEVKKPGSSVKVSCKASGYSFTTYYIHWVRQAPGQGLEWMGWFFPGSDNIKYNEKFKGRVTITADTSTSTAYMELSSLRSEDTAVYYCAGSYYSYDVLDYWGQGTTVTVSSASTKGPSVFPLAPSSKSTSGGTAALGCLVKDYFPEPVTVSWNSGALTSGVHTFPAVLQSSGLYSLSSVVTVPSSSLGTQTYICNVNHKPSNTKVDKKVEPKSC

SEQ ID NO: 812 - protein, 222 aa, synthetic construct
QVQLVQSGAEVKKPGSSVKVSCKASGYSFTTYYIHWVRQAPGQGLEWMGWFFPGSENIKYNEKFKGRVTITADTSTSTAYMELSSLRSEDTAVYYCAGSYYSYDVLDYWGQGTTVTVSSASTKGPSVFPLAPSSKSTSGGTAALGCLVKDYFPEPVTVSWNSGALTSGVHTFPAVLQSSGLYSLSSVVTVPSSSLGTQTYICNVNHKPSNTKVDKKVEPKSC

SEQ ID NO: 813 - protein, 222 aa, synthetic construct
QVQLVQSGAEVKKPGSSVKVSCKASGYSFTTYYIHWVRQAPGQGLEWMGWFFPGSHNIKYNEKFKGRVTITADTSTSTAYMELSSLRSEDTAVYYCAGSYYSYDVLDYWGQGTTVTVSSASTKGPSVFPLAPSSKSTSGGTAALGCLVKDYFPEPVTVSWNSGALTSGVHTFPAVLQSSGLYSLSSVVTVPSSSLGTQTYICNVNHKPSNTKVDKKVEPKSC

SEQ ID NO: 814 - protein, 222 aa, synthetic construct
QVQLVQSGAEVKKPGSSVKVSCKASGYSFTTYYIHWVRQAPGQGLEWMGWFFPGSINIKYNEKFKGRVTITADTSTSTAYMELSSLRSEDTAVYYCAGSYYSYDVLDYWGQGTTVTVSSASTKGPSVFPLAPSSKSTSGGTAALGCLVKDYFPEPVTVSWNSGALTSGVHTFPAVLQSSGLYSLSSVVTVPSSSLGTQTYICNVNHKPSNTKVDKKVEPKSC

SEQ ID NO: 815 - protein, 222 aa, synthetic construct
QVQLVQSGAEVKKPGSSVKVSCKASGYSFTTYYIHWVRQAPGQGLEWMGWFFPGSKNIKYNEKFKGRVTITADTSTSTAYMELSSLRSEDTAVYYCAGSYYSYDVLDYWGQGTTVTVSSASTKGPSVFPLAPSSKSTSGGTAALGCLVKDYFPEPVTVSWNSGALTSGVHTFPAVLQSSGLYSLSSVVTVPSSSLGTQTYICNVNHKPSNTKVDKKVEPKSC

SEQ ID NO: 816 - protein, 222 aa, synthetic construct
QVQLVQSGAEVKKPGSSVKVSCKASGYSFTTYYIHWVRQAPGQGLEWMGWFFPGSLNIKYNEKFKGRVTITADTSTSTAYMELSSLRSEDTAVYYCAGSYYSYDVLDYWGQGTTVTVSSASTKGPSVFPLAPSSKSTSGGTAALGCLVKDYFPEPVTVSWNSGALTSGVHTFPAVLQSSGLYSLSSVVTVPSSSLGTQTYICNVNHKPSNTKVDKKVEPKSC

SEQ ID NO: 817 - protein, 222 aa, synthetic construct
QVQLVQSGAEVKKPGSSVKVSCKASGYSFTTYYIHWVRQAPGQGLEWMGWFFPGSMNIKYNEKFKGRVTITADTSTSTAYMELSSLRSEDTAVYYCAGSYYSYDVLDYWGQGTTVTVSSASTKGPSVFPLAPSSKSTSGGTAALGCLVKDYFPEPVTVSWNSGALTSGVHTFPAVLQSSGLYSLSSVVTVPSSSLGTQTYICNVNHKPSNTKVDKKVEPKSC

SEQ ID NO: 818 - protein, 222 aa, synthetic construct
QVQLVQSGAEVKKPGSSVKVSCKASGYSFTTYYIHWVRQAPGQGLEWMGWFFPGSNNIKYNEKFKGRVTITADTSTSTAYMELSSLRSEDTAVYYCAGSYYSYDVLDYWGQGTTVTVSSASTKGPSVFPLAPSSKSTSGGTAALGCLVKDYFPEPVTVSWNSGALTSGVHTFPAVLQSSGLYSLSSVVTVPSSSLGTQTYICNVNHKPSNTKVDKKVEPKSC

SEQ ID NO: 819 - protein, 222 aa, synthetic construct
QVQLVQSGAEVKKPGSSVKVSCKASGYSFTTYYIHWVRQAPGQGLEWMGWFFPGSPNIKYNEKFKGRVTITADTSTSTAYMELSSLRSEDTAVYYCAGSYYSYDVLDYWGQGTTVTVSSASTKGPSVFPLAPSSKSTSGGTAALGCLVKDYFPEPVTVSWNSGALTSGVHTFPAVLQSSGLYSLSSVVTVPSSSLGTQTYICNVNHKPSNTKVDKKVEPKSC

SEQ ID NO: 820 - protein, 222 aa, synthetic construct
QVQLVQSGAEVKKPGSSVKVSCKASGYSFTTYYIHWVRQAPGQGLEWMGWFFPGSQNIKYNEKFKGRVTITADTSTSTAYMELSSLRSEDTAVYYCAGSYYSYDVLDYWGQGTTVTVSSASTKGPSVFPLAPSSKSTSGGTAALGCLVKDYFPEPVTVSWNSGALTSGVHTFPAVLQSSGLYSLSSVVTVPSSSLGTQTYICNVNHKPSNTKVDKKVEPKSC

SEQ ID NO: 821 - protein, 222 aa, synthetic construct
QVQLVQSGAEVKKPGSSVKVSCKASGYSFTTYYIHWVRQAPGQGLEWMGWFFPGSRNIKYNEKFKGRVTITADTSTSTAYMELSSLRSEDTAVYYCAGSYYSYDVLDYWGQGTTVTVSSASTKGPSVFPLAPSSKSTSGGTAALGCLVKDYFPEPVTVSWNSGALTSGVHTFPAVLQSSGLYSLSSVVTVPSSSLGTQTYICNVNHKPSNTKVDKKVEPKSC

SEQ ID NO: 822 - protein, 222 aa, synthetic construct
QVQLVQSGAEVKKPGSSVKVSCKASGYSFTTYYIHWVRQAPGQGLEWMGWFFPGSSNIKYNEKFKGRVTITADTSTSTAYMELSSLRSEDTAVYYCAGSYYSYDVLDYWGQGTTVTVSSASTKGPSVFPLAPSSKSTSGGTAALGCLVKDYFPEPVTVSWNSGALTSGVHTFPAVLQSSGLYSLSSVVTVPSSSLGTQTYICNVNHKPSNTKVDKKVEPKSC

SEQ ID NO: 823 - protein, 222 aa, synthetic construct
QVQLVQSGAEVKKPGSSVKVSCKASGYSFTTYYIHWVRQAPGQGLEWMGWFFPGSTNIKYNEKFKGRVTITADTSTSTAYMELSSLRSEDTAVYYCAGSYYSYDVLDYWGQGTTVTVSSASTKGPSVFPLAPSSKSTSGGTAALGCLVKDYFPEPVTVSWNSGALTSGVHTFPAVLQSSGLYSLSSVVTVPSSSLGTQTYICNVNHKPSNTKVDKKVEPKSC

SEQ ID NO: 824 - protein, 222 aa, synthetic construct
QVQLVQSGAEVKKPGSSVKVSCKASGYSFTTYYIHWVRQAPGQGLEWMGWFFPGSVNIKYNEKFKGRVTITADTSTSTAYMELSSLRSEDTAVYYCAGSYYSYDVLDYWGQGTTVTVSSASTKGPSVFPLAPSSKSTSGGTAALGCLVKDYFPEPVTVSWNSGALTSGVHTFPAVLQSSGLYSLSSVVTVPSSSLGTQTYICNVNHKPSNTKVDKKVEPKSC

SEQ ID NO: 825 - protein, 222 aa, synthetic construct
QVQLVQSGAEVKKPGSSVKVSCKASGYSFTTYYIHWVRQAPGQGLEWMGWFFPGSWNIKYNEKFKGRVTITADTSTSTAYMELSSLRSEDTAVYYCAGSYYSYDVLDYWGQGTTVTVSSASTKGPSVFPLAPSSKSTSGGTAALGCLVKDYFPEPVTVSWNSGALTSGVHTFPAVLQSSGLYSLSSVVTVPSSSLGTQTYICNVNHKPSNTKVDKKVEPKSC

SEQ ID NO: 826 - protein, 222 aa, synthetic construct
QVQLVQSGAEVKKPGSSVKVSCKASGYSFTTYYIHWVRQAPGQGLEWMGWFFPGSYNIKYNEKFKGRVTITADTSTSTAYMELSSLRSEDTAVYYCAGSYYSYDVLDYWGQGTTVTVSSASTKGPSVFPLAPSSKSTSGGTAALGCLVKDYFPEPVTVSWNSGALTSGVHTFPAVLQSSGLYSLSSVVTVPSSSLGTQTYICNVNHKPSNTKVDKKVEPKSC

SEQ ID NO: 827 - protein, 222 aa, synthetic construct
QVQLVQSGAEVKKPGSSVKVSCKASGYSFTTYYIHWVRQAPGQGLEWMGWFFPGSGAIKYNEKFKGRVTITADTSTSTAYMELSSLRSEDTAVYYCAGSYYSYDVLDYWGQGTTVTVSSASTKGPSVFPLAPSSKSTSGGTAALGCLVKDYFPEPVTVSWNSGALTSGVHTFPAVLQSSGLYSLSSVVTVPSSSLGTQTYICNVNHKPSNTKVDKKVEPKSC

SEQ ID NO: 828 - protein, 222 aa, synthetic construct
QVQLVQSGAEVKKPGSSVKVSCKASGYSFTTYYIHWVRQAPGQGLEWMGWFFPGSGDIKYNEKFKGRVTITADTSTSTAYMELSSLRSEDTAVYYCAGSYYSYDVLDYWGQGTTVTVSSASTKGPSVFPLAPSSKSTSGGTAALGCLVKDYFPEPVTVSWNSGALTSGVHTFPAVLQSSGLYSLSSVVTVPSSSLGTQTYICNVNHKPSNTKVDKKVEPKSC

SEQ ID NO: 829 - protein, 222 aa, synthetic construct
QVQLVQSGAEVKKPGSSVKVSCKASGYSFTTYYIHWVRQAPGQGLEWMGWFFPGSGEIKYNEKFKGRVTITADTSTSTAYMELSSLRSEDTAVYYCAGSYYSYDVLDYWGQGTTVTVSSASTKGPSVFPLAPSSKSTSGGTAALGCLVKDYFPEPVTVSWNSGALTSGVHTFPAVLQSSGLYSLSSVVTVPSSSLGTQTYICNVNHKPSNTKVDKKVEPKSC

SEQ ID NO: 830 - protein, 222 aa, synthetic construct
QVQLVQSGAEVKKPGSSVKVSCKASGYSFTTYYIHWVRQAPGQGLEWMGWFFPGSGFIKYNEKFKGRVTITADTSTSTAYMELSSLRSEDTAVYYCAGSYYSYDVLDYWGQGTTVTVSSASTKGPSVFPLAPSSKSTSGGTAALGCLVKDYFPEPVTVSWNSGALTSGVHTFPAVLQSSGLYSLSSVVTVPSSSLGTQTYICNVNHKPSNTKVDKKVEPKSC

SEQ ID NO: 831 - protein, 222 aa, synthetic construct
QVQLVQSGAEVKKPGSSVKVSCKASGYSFTTYYIHWVRQAPGQGLEWMGWFFPGSGGIKYNEKFKGRVTITADTSTSTAYMELSSLRSEDTAVYYCAGSYYSYDVLDYWGQGTTVTVSSASTKGPSVFPLAPSSKSTSGGTAALGCLVKDYFPEPVTVSWNSGALTSGVHTFPAVLQSSGLYSLSSVVTVPSSSLGTQTYICNVNHKPSNTKVDKKVEPKSC

SEQ ID NO: 832 - protein, 222 aa, synthetic construct
QVQLVQSGAEVKKPGSSVKVSCKASGYSFTTYYIHWVRQAPGQGLEWMGWFFPGSGHIKYNEKFKGRVTITADTSTSTAYMELSSLRSEDTAVYYCAGSYYSYDVLDYWGQGTTVTVSSASTKGPSVFPLAPSSKSTSGGTAALGCLVKDYFPEPVTVSWNSGALTSGVHTFPAVLQSSGLYSLSSVVTVPSSSLGTQTYICNVNHKPSNTKVDKKVEPKSC

SEQ ID NO: 833 - protein, 222 aa, synthetic construct
QVQLVQSGAEVKKPGSSVKVSCKASGYSFTTYYIHWVRQAPGQGLEWMGWFFPGSGIIKYNEKFKGRVTITADTSTSTAYMELSSLRSEDTAVYYCAGSYYSYDVLDYWGQGTTVTVSSASTKGPSVFPLAPSSKSTSGGTAALGCLVKDYFPEPVTVSWNSGALTSGVHTFPAVLQSSGLYSLSSVVTVPSSSLGTQTYICNVNHKPSNTKVDKKVEPKSC

SEQ ID NO: 834 - protein, 222 aa, synthetic construct
QVQLVQSGAEVKKPGSSVKVSCKASGYSFTTYYIHWVRQAPGQGLEWMGWFFPGSGKIKYNEKFKGRVTITADTSTSTAYMELSSLRSEDTAVYYCAGSYYSYDVLDYWGQGTTVTVSSASTKGPSVFPLAPSSKSTSGGTAALGCLVKDYFPEPVTVSWNSGALTSGVHTFPAVLQSSGLYSLSSVVTVPSSSLGTQTYICNVNHKPSNTKVDKKVEPKSC

SEQ ID NO: 835 - protein, 222 aa, synthetic construct
QVQLVQSGAEVKKPGSSVKVSCKASGYSFTTYYIHWVRQAPGQGLEWMGWFFPGSGLIKYNEKFKGRVTITADTSTSTAYMELSSLRSEDTAVYYCAGSYYSYDVLDYWGQGTTVTVSSASTKGPSVFPLAPSSKSTSGGTAALGCLVKDYFPEPVTVSWNSGALTSGVHTFPAVLQSSGLYSLSSVVTVPSSSLGTQTYICNVNHKPSNTKVDKKVEPKSC

SEQ ID NO: 836 - protein, 222 aa, synthetic construct
QVQLVQSGAEVKKPGSSVKVSCKASGYSFTTYYIHWVRQAPGQGLEWMGWFFPGSGMIKYNEKFKGRVTITADTSTSTAYMELSSLRSEDTAVYYCAGSYYSYDVLDYWGQGTTVTVSSASTKGPSVFPLAPSSKSTSGGTAALGCLVKDYFPEPVTVSWNSGALTSGVHTFPAVLQSSGLYSLSSVVTVPSSSLGTQTYICNVNHKPSNTKVDKKVEPKSC

SEQ ID NO: 837 - protein, 222 aa, synthetic construct
QVQLVQSGAEVKKPGSSVKVSCKASGYSFTTYYIHWVRQAPGQGLEWMGWFFPGSGPIKYNEKFKGRVTITADTSTSTAYMELSSLRSEDTAVYYCAGSYYSYDVLDYWGQGTTVTVSSASTKGPSVFPLAPSSKSTSGGTAALGCLVKDYFPEPVTVSWNSGALTSGVHTFPAVLQSSGLYSLSSVVTVPSSSLGTQTYICNVNHKPSNTKVDKKVEPKSC

SEQ ID NO: 838 - protein, 222 aa, synthetic construct
QVQLVQSGAEVKKPGSSVKVSCKASGYSFTTYYIHWVRQAPGQGLEWMGWFFPGSGQIKYNEKFKGRVTITADTSTSTAYMELSSLRSEDTAVYYCAGSYYSYDVLDYWGQGTTVTVSSASTKGPSVFPLAPSSKSTSGGTAALGCLVKDYFPEPVTVSWNSGALTSGVHTFPAVLQSSGLYSLSSVVTVPSSSLGTQTYICNVNHKPSNTKVDKKVEPKSC

SEQ ID NO: 839 - protein, 222 aa, synthetic construct
QVQLVQSGAEVKKPGSSVKVSCKASGYSFTTYYIHWVRQAPGQGLEWMGWFFPGSGRIKYNEKFKGRVTITADTSTSTAYMELSSLRSEDTAVYYCAGSYYSYDVLDYWGQGTTVTVSSASTKGPSVFPLAPSSKSTSGGTAALGCLVKDYFPEPVTVSWNSGALTSGVHTFPAVLQSSGLYSLSSVVTVPSSSLGTQTYICNVNHKPSNTKVDKKVEPKSC

SEQ ID NO: 840 - protein, 222 aa, synthetic construct
QVQLVQSGAEVKKPGSSVKVSCKASGYSFTTYYIHWVRQAPGQGLEWMGWFFPGSGTIKYNEKFKGRVTITADTSTSTAYMELSSLRSEDTAVYYCAGSYYSYDVLDYWGQGTTVTVSSASTKGPSVFPLAPSSKSTSGGTAALGCLVKDYFPEPVTVSWNSGALTSGVHTFPAVLQSSGLYSLSSVVTVPSSSLGTQTYICNVNHKPSNTKVDKKVEPKSC

SEQ ID NO: 841 - protein, 222 aa, synthetic construct
QVQLVQSGAEVKKPGSSVKVSCKASGYSFTTYYIHWVRQAPGQGLEWMGWFFPGSGVIKYNEKFKGRVTITADTSTSTAYMELSSLRSEDTAVYYCAGSYYSYDVLDYWGQGTTVTVSSASTKGPSVFPLAPSSKSTSGGTAALGCLVKDYFPEPVTVSWNSGALTSGVHTFPAVLQSSGLYSLSSVVTVPSSSLGTQTYICNVNHKPSNTKVDKKVEPKSC

SEQ ID NO: 842 - protein, 222 aa, synthetic construct
QVQLVQSGAEVKKPGSSVKVSCKASGYSFTTYYIHWVRQAPGQGLEWMGWFFPGSGWIKYNEKFKGRVTITADTSTSTAYMELSSLRSEDTAVYYCAGSYYSYDVLDYWGQGTTVTVSSASTKGPSVFPLAPSSKSTSGGTAALGCLVKDYFPEPVTVSWNSGALTSGVHTFPAVLQSSGLYSLSSVVTVPSSSLGTQTYICNVNHKPSNTKVDKKVEPKSC

SEQ ID NO: 843 - protein, 222 aa, synthetic construct
QVQLVQSGAEVKKPGSSVKVSCKASGYSFTTYYIHWVRQAPGQGLEWMGWFFPGSGYIKYNEKFKGRVTITADTSTSTAYMELSSLRSEDTAVYYCAGSYYSYDVLDYWGQGTTVTVSSASTKGPSVFPLAPSSKSTSGGTAALGCLVKDYFPEPVTVSWNSGALTSGVHTFPAVLQSSGLYSLSSVVTVPSSSLGTQTYICNVNHKPSNTKVDKKVEPKSC

SEQ ID NO: 844 - protein, 222 aa, synthetic construct
QVQLVQSGAEVKKPGSSVKVSCKASGYSFTTYYIHWVRQAPGQGLEWMGWFFPGSGNAKYNEKFKGRVTITADTSTSTAYMELSSLRSEDTAVYYCAGSYYSYDVLDYWGQGTTVTVSSASTKGPSVFPLAPSSKSTSGGTAALGCLVKDYFPEPVTVSWNSGALTSGVHTFPAVLQSSGLYSLSSVVTVPSSSLGTQTYICNVNHKPSNTKVDKKVEPKSC

SEQ ID NO: 845 - protein, 222 aa, synthetic construct
QVQLVQSGAEVKKPGSSVKVSCKASGYSFTTYYIHWVRQAPGQGLEWMGWFFPGSGNDKYNEKFKGRVTITADTSTSTAYMELSSLRSEDTAVYYCAGSYYSYDVLDYWGQGTTVTVSSASTKGPSVFPLAPSSKSTSGGTAALGCLVKDYFPEPVTVSWNSGALTSGVHTFPAVLQSSGLYSLSSVVTVPSSSLGTQTYICNVNHKPSNTKVDKKVEPKSC

SEQ ID NO: 846 - protein, 222 aa, synthetic construct
QVQLVQSGAEVKKPGSSVKVSCKASGYSFTTYYIHWVRQAPGQGLEWMGWFFPGSGNEKYNEKFKGRVTITADTSTSTAYMELSSLRSEDTAVYYCAGSYYSYDVLDYWGQGTTVTVSSASTKGPSVFPLAPSSKSTSGGTAALGCLVKDYFPEPVTVSWNSGALTSGVHTFPAVLQSSGLYSLSSVVTVPSSSLGTQTYICNVNHKPSNTKVDKKVEPKSC

SEQ ID NO: 847 - protein, 222 aa, synthetic construct
QVQLVQSGAEVKKPGSSVKVSCKASGYSFTTYYIHWVRQAPGQGLEWMGWFFPGSGNFKYNEKFKGRVTITADTSTSTAYMELSSLRSEDTAVYYCAGSYYSYDVLDYWGQGTTVTVSSASTKGPSVFPLAPSSKSTSGGTAALGCLVKDYFPEPVTVSWNSGALTSGVHTFPAVLQSSGLYSLSSVVTVPSSSLGTQTYICNVNHKPSNTKVDKKVEPKSC

SEQ ID NO: 848 - protein, 222 aa, synthetic construct
QVQLVQSGAEVKKPGSSVKVSCKASGYSFTTYYIHWVRQAPGQGLEWMGWFFPGSGNKKYNEKFKGRVTITADTSTSTAYMELSSLRSEDTAVYYCAGSYYSYDVLDYWGQGTTVTVSSASTKGPSVFPLAPSSKSTSGGTAALGCLVKDYFPEPVTVSWNSGALTSGVHTFPAVLQSSGLYSLSSVVTVPSSSLGTQTYICNVNHKPSNTKVDKKVEPKSC

SEQ ID NO: 849 - protein, 222 aa, synthetic construct
QVQLVQSGAEVKKPGSSVKVSCKASGYSFTTYYIHWVRQAPGQGLEWMGWFFPGSGNLKYNEKFKGRVTITADTSTSTAYMELSSLRSEDTAVYYCAGSYYSYDVLDYWGQGTTVTVSSASTKGPSVFPLAPSSKSTSGGTAALGCLVKDYFPEPVTVSWNSGALTSGVHTFPAVLQSSGLYSLSSVVTVPSSSLGTQTYICNVNHKPSNTKVDKKVEPKSC

SEQ ID NO: 850 - protein, 222 aa, synthetic construct
QVQLVQSGAEVKKPGSSVKVSCKASGYSFTTYYIHWVRQAPGQGLEWMGWFFPGSGNMKYNEKFKGRVTITADTSTSTAYMELSSLRSEDTAVYYCAGSYYSYDVLDYWGQGTTVTVSSASTKGPSVFPLAPSSKSTSGGTAALGCLVKDYFPEPVTVSWNSGALTSGVHTFPAVLQSSGLYSLSSVVTVPSSSLGTQTYICNVNHKPSNTKVDKKVEPKSC

SEQ ID NO: 851 - protein, 222 aa, synthetic construct
QVQLVQSGAEVKKPGSSVKVSCKASGYSFTTYYIHWVRQAPGQGLEWMGWFFPGSGNNKYNEKFKGRVTITADTSTSTAYMELSSLRSEDTAVYYCAGSYYSYDVLDYWGQGTTVTVSSASTKGPSVFPLAPSSKSTSGGTAALGCLVKDYFPEPVTVSWNSGALTSGVHTFPAVLQSSGLYSLSSVVTVPSSSLGTQTYICNVNHKPSNTKVDKKVEPKSC

SEQ ID NO: 852 - protein, 222 aa, synthetic construct
QVQLVQSGAEVKKPGSSVKVSCKASGYSFTTYYIHWVRQAPGQGLEWMGWFFPGSGNPKYNEKFKGRVTITADTSTSTAYMELSSLRSEDTAVYYCAGSYYSYDVLDYWGQGTTVTVSSASTKGPSVFPLAPSSKSTSGGTAALGCLVKDYFPEPVTVSWNSGALTSGVHTFPAVLQSSGLYSLSSVVTVPSSSLGTQTYICNVNHKPSNTKVDKKVEPKSC

SEQ ID NO: 853 - protein, 222 aa, synthetic construct
QVQLVQSGAEVKKPGSSVKVSCKASGYSFTTYYIHWVRQAPGQGLEWMGWFFPGSGNQKYNEKFKGRVTITADTSTSTAYMELSSLRSEDTAVYYCAGSYYSYDVLDYWGQGTTVTVSSASTKGPSVFPLAPSSKSTSGGTAALGCLVKDYFPEPVTVSWNSGALTSGVHTFPAVLQSSGLYSLSSVVTVPSSSLGTQTYICNVNHKPSNTKVDKKVEPKSC

SEQ ID NO: 854 - protein, 222 aa, synthetic construct
QVQLVQSGAEVKKPGSSVKVSCKASGYSFTTYYIHWVRQAPGQGLEWMGWFFPGSGNRKYNEKFKGRVTITADTSTSTAYMELSSLRSEDTAVYYCAGSYYSYDVLDYWGQGTTVTVSSASTKGPSVFPLAPSSKSTSGGTAALGCLVKDYFPEPVTVSWNSGALTSGVHTFPAVLQSSGLYSLSSVVTVPSSSLGTQTYICNVNHKPSNTKVDKKVEPKSC

SEQ ID NO: 855 - protein, 222 aa, synthetic construct
QVQLVQSGAEVKKPGSSVKVSCKASGYSFTTYYIHWVRQAPGQGLEWMGWFFPGSGNSKYNEKFKGRVTITADTSTSTAYMELSSLRSEDTAVYYCAGSYYSYDVLDYWGQGTTVTVSSASTKGPSVFPLAPSSKSTSGGTAALGCLVKDYFPEPVTVSWNSGALTSGVHTFPAVLQSSGLYSLSSVVTVPSSSLGTQTYICNVNHKPSNTKVDKKVEPKSC

SEQ ID NO: 856 - protein, 222 aa, synthetic construct
QVQLVQSGAEVKKPGSSVKVSCKASGYSFTTYYIHWVRQAPGQGLEWMGWFFPGSGNTKYNEKFKGRVTITADTSTSTAYMELSSLRSEDTAVYYCAGSYYSYDVLDYWGQGTTVTVSSASTKGPSVFPLAPSSKSTSGGTAALGCLVKDYFPEPVTVSWNSGALTSGVHTFPAVLQSSGLYSLSSVVTVPSSSLGTQTYICNVNHKPSNTKVDKKVEPKSC

SEQ ID NO: 857 - protein, 222 aa, synthetic construct
QVQLVQSGAEVKKPGSSVKVSCKASGYSFTTYYIHWVRQAPGQGLEWMGWFFPGSGNVKYNEKFKGRVTITADTSTSTAYMELSSLRSEDTAVYYCAGSYYSYDVLDYWGQGTTVTVSSASTKGPSVFPLAPSSKSTSGGTAALGCLVKDYFPEPVTVSWNSGALTSGVHTFPAVLQSSGLYSLSSVVTVPSSSLGTQTYICNVNHKPSNTKVDKKVEPKSC

SEQ ID NO: 858 - protein, 222 aa, synthetic construct
QVQLVQSGAEVKKPGSSVKVSCKASGYSFTTYYIHWVRQAPGQGLEWMGWFFPGSGNWKYNEKFKGRVTITADTSTSTAYMELSSLRSEDTAVYYCAGSYYSYDVLDYWGQGTTVTVSSASTKGPSVFPLAPSSKSTSGGTAALGCLVKDYFPEPVTVSWNSGALTSGVHTFPAVLQSSGLYSLSSVVTVPSSSLGTQTYICNVNHKPSNTKVDKKVEPKSC

SEQ ID NO: 859 - protein, 222 aa, synthetic construct
QVQLVQSGAEVKKPGSSVKVSCKASGYSFTTYYIHWVRQAPGQGLEWMGWFFPGSGNYKYNEKFKGRVTITADTSTSTAYMELSSLRSEDTAVYYCAGSYYSYDVLDYWGQGTTVTVSSASTKGPSVFPLAPSSKSTSGGTAALGCLVKDYFPEPVTVSWNSGALTSGVHTFPAVLQSSGLYSLSSVVTVPSSSLGTQTYICNVNHKPSNTKVDKKVEPKSC

SEQ ID NO: 860 - protein, 222 aa, synthetic construct
QVQLVQSGAEVKKPGSSVKVSCKASGYSFTTYYIHWVRQAPGQGLEWMGWFFPGSGNIAYNEKFKGRVTITADTSTSTAYMELSSLRSEDTAVYYCAGSYYSYDVLDYWGQGTTVTVSSASTKGPSVFPLAPSSKSTSGGTAALGCLVKDYFPEPVTVSWNSGALTSGVHTFPAVLQSSGLYSLSSVVTVPSSSLGTQTYICNVNHKPSNTKVDKKVEPKSC

SEQ ID NO: 861 - protein, 222 aa, synthetic construct
QVQLVQSGAEVKKPGSSVKVSCKASGYSFTTYYIHWVRQAPGQGLEWMGWFFPGSGNIDYNEKFKGRVTITADTSTSTAYMELSSLRSEDTAVYYCAGSYYSYDVLDYWGQGTTVTVSSASTKGPSVFPLAPSSKSTSGGTAALGCLVKDYFPEPVTVSWNSGALTSGVHTFPAVLQSSGLYSLSSVVTVPSSSLGTQTYICNVNHKPSNTKVDKKVEPKSC

SEQ ID NO: 862 - protein, 222 aa, synthetic construct
QVQLVQSGAEVKKPGSSVKVSCKASGYSFTTYYIHWVRQAPGQGLEWMGWFFPGSGNIEYNEKFKGRVTITADTSTSTAYMELSSLRSEDTAVYYCAGSYYSYDVLDYWGQGTTVTVSSASTKGPSVFPLAPSSKSTSGGTAALGCLVKDYFPEPVTVSWNSGALTSGVHTFPAVLQSSGLYSLSSVVTVPSSSLGTQTYICNVNHKPSNTKVDKKVEPKSC

SEQ ID NO: 863 - protein, 222 aa, synthetic construct
QVQLVQSGAEVKKPGSSVKVSCKASGYSFTTYYIHWVRQAPGQGLEWMGWFFPGSGNIFYNEKFKGRVTITADTSTSTAYMELSSLRSEDTAVYYCAGSYYSYDVLDYWGQGTTVTVSSASTKGPSVFPLAPSSKSTSGGTAALGCLVKDYFPEPVTVSWNSGALTSGVHTFPAVLQSSGLYSLSSVVTVPSSSLGTQTYICNVNHKPSNTKVDKKVEPKSC

SEQ ID NO: 864 - protein, 222 aa, synthetic construct
QVQLVQSGAEVKKPGSSVKVSCKASGYSFTTYYIHWVRQAPGQGLEWMGWFFPGSGNIGYNEKFKGRVTITADTSTSTAYMELSSLRSEDTAVYYCAGSYYSYDVLDYWGQGTTVTVSSASTKGPSVFPLAPSSKSTSGGTAALGCLVKDYFPEPVTVSWNSGALTSGVHTFPAVLQSSGLYSLSSVVTVPSSSLGTQTYICNVNHKPSNTKVDKKVEPKSC

SEQ ID NO: 865 - protein, 222 aa, synthetic construct
QVQLVQSGAEVKKPGSSVKVSCKASGYSFTTYYIHWVRQAPGQGLEWMGWFFPGSGNIHYNEKFKGRVTITADTSTSTAYMELSSLRSEDTAVYYCAGSYYSYDVLDYWGQGTTVTVSSASTKGPSVFPLAPSSKSTSGGTAALGCLVKDYFPEPVTVSWNSGALTSGVHTFPAVLQSSGLYSLSSVVTVPSSSLGTQTYICNVNHKPSNTKVDKKVEPKSC

SEQ ID NO: 866 - protein, 222 aa, synthetic construct
QVQLVQSGAEVKKPGSSVKVSCKASGYSFTTYYIHWVRQAPGQGLEWMGWFFPGSGNILYNEKFKGRVTITADTSTSTAYMELSSLRSEDTAVYYCAGSYYSYDVLDYWGQGTTVTVSSASTKGPSVFPLAPSSKSTSGGTAALGCLVKDYFPEPVTVSWNSGALTSGVHTFPAVLQSSGLYSLSSVVTVPSSSLGTQTYICNVNHKPSNTKVDKKVEPKSC

SEQ ID NO: 867 - protein, 222 aa, synthetic construct
QVQLVQSGAEVKKPGSSVKVSCKASGYSFTTYYIHWVRQAPGQGLEWMGWFFPGSGNIMYNEKFKGRVTITADTSTSTAYMELSSLRSEDTAVYYCAGSYYSYDVLDYWGQGTTVTVSSASTKGPSVFPLAPSSKSTSGGTAALGCLVKDYFPEPVTVSWNSGALTSGVHTFPAVLQSSGLYSLSSVVTVPSSSLGTQTYICNVNHKPSNTKVDKKVEPKSC

SEQ ID NO: 868 - protein, 222 aa, synthetic construct
QVQLVQSGAEVKKPGSSVKVSCKASGYSFTTYYIHWVRQAPGQGLEWMGWFFPGSGNINYNEKFKGRVTITADTSTSTAYMELSSLRSEDTAVYYCAGSYYSYDVLDYWGQGTTVTVSSASTKGPSVFPLAPSSKSTSGGTAALGCLVKDYFPEPVTVSWNSGALTSGVHTFPAVLQSSGLYSLSSVVTVPSSSLGTQTYICNVNHKPSNTKVDKKVEPKSC

SEQ ID NO: 869 - protein, 222 aa, synthetic construct
QVQLVQSGAEVKKPGSSVKVSCKASGYSFTTYYIHWVRQAPGQGLEWMGWFFPGSGNIPYNEKFKGRVTITADTSTSTAYMELSSLRSEDTAVYYCAGSYYSYDVLDYWGQGTTVTVSSASTKGPSVFPLAPSSKSTSGGTAALGCLVKDYFPEPVTVSWNSGALTSGVHTFPAVLQSSGLYSLSSVVTVPSSSLGTQTYICNVNHKPSNTKVDKKVEPKSC

SEQ ID NO: 870 - protein, 222 aa, synthetic construct
QVQLVQSGAEVKKPGSSVKVSCKASGYSFTTYYIHWVRQAPGQGLEWMGWFFPGSGNIQYNEKFKGRVTITADTSTSTAYMELSSLRSEDTAVYYCAGSYYSYDVLDYWGQGTTVTVSSASTKGPSVFPLAPSSKSTSGGTAALGCLVKDYFPEPVTVSWNSGALTSGVHTFPAVLQSSGLYSLSSVVTVPSSSLGTQTYICNVNHKPSNTKVDKKVEPKSC

SEQ ID NO: 871 - protein, 222 aa, synthetic construct
QVQLVQSGAEVKKPGSSVKVSCKASGYSFTTYYIHWVRQAPGQGLEWMGWFFPGSGNIRYNEKFKGRVTITADTSTSTAYMELSSLRSEDTAVYYCAGSYYSYDVLDYWGQGTTVTVSSASTKGPSVFPLAPSSKSTSGGTAALGCLVKDYFPEPVTVSWNSGALTSGVHTFPAVLQSSGLYSLSSVVTVPSSSLGTQTYICNVNHKPSNTKVDKKVEPKSC

SEQ ID NO: 872 - protein, 222 aa, synthetic construct
QVQLVQSGAEVKKPGSSVKVSCKASGYSFTTYYIHWVRQAPGQGLEWMGWFFPGSGNISYNEKFKGRVTITADTSTSTAYMELSSLRSEDTAVYYCAGSYYSYDVLDYWGQGTTVTVSSASTKGPSVFPLAPSSKSTSGGTAALGCLVKDYFPEPVTVSWNSGALTSGVHTFPAVLQSSGLYSLSSVVTVPSSSLGTQTYICNVNHKPSNTKVDKKVEPKSC

SEQ ID NO: 873 - protein, 222 aa, synthetic construct
QVQLVQSGAEVKKPGSSVKVSCKASGYSFTTYYIHWVRQAPGQGLEWMGWFFPGSGNITYNEKFKGRVTITADTSTSTAYMELSSLRSEDTAVYYCAGSYYSYDVLDYWGQGTTVTVSSASTKGPSVFPLAPSSKSTSGGTAALGCLVKDYFPEPVTVSWNSGALTSGVHTFPAVLQSSGLYSLSSVVTVPSSSLGTQTYICNVNHKPSNTKVDKKVEPKSC

SEQ ID NO: 874 - protein, 222 aa, synthetic construct
QVQLVQSGAEVKKPGSSVKVSCKASGYSFTTYYIHWVRQAPGQGLEWMGWFFPGSGNIVYNEKFKGRVTITADTSTSTAYMELSSLRSEDTAVYYCAGSYYSYDVLDYWGQGTTVTVSSASTKGPSVFPLAPSSKSTSGGTAALGCLVKDYFPEPVTVSWNSGALTSGVHTFPAVLQSSGLYSLSSVVTVPSSSLGTQTYICNVNHKPSNTKVDKKVEPKSC

SEQ ID NO: 875 - protein, 222 aa, synthetic construct
QVQLVQSGAEVKKPGSSVKVSCKASGYSFTTYYIHWVRQAPGQGLEWMGWFFPGSGNIWYNEKFKGRVTITADTSTSTAYMELSSLRSEDTAVYYCAGSYYSYDVLDYWGQGTTVTVSSASTKGPSVFPLAPSSKSTSGGTAALGCLVKDYFPEPVTVSWNSGALTSGVHTFPAVLQSSGLYSLSSVVTVPSSSLGTQTYICNVNHKPSNTKVDKKVEPKSC

SEQ ID NO: 876 - protein, 222 aa, synthetic construct
QVQLVQSGAEVKKPGSSVKVSCKASGYSFTTYYIHWVRQAPGQGLEWMGWFFPGSGNIKYDEKFKGRVTITADTSTSTAYMELSSLRSEDTAVYYCAGSYYSYDVLDYWGQGTTVTVSSASTKGPSVFPLAPSSKSTSGGTAALGCLVKDYFPEPVTVSWNSGALTSGVHTFPAVLQSSGLYSLSSVVTVPSSSLGTQTYICNVNHKPSNTKVDKKVEPKSC

SEQ ID NO: 877 - protein, 222 aa, synthetic construct
QVQLVQSGAEVKKPGSSVKVSCKASGYSFTTYYIHWVRQAPGQGLEWMGWFFPGSGNIKYEEKFKGRVTITADTSTSTAYMELSSLRSEDTAVYYCAGSYYSYDVLDYWGQGTTVTVSSASTKGPSVFPLAPSSKSTSGGTAALGCLVKDYFPEPVTVSWNSGALTSGVHTFPAVLQSSGLYSLSSVVTVPSSSLGTQTYICNVNHKPSNTKVDKKVEPKSC

SEQ ID NO: 878 - protein, 222 aa, synthetic construct
QVQLVQSGAEVKKPGSSVKVSCKASGYSFTTYYIHWVRQAPGQGLEWMGWFFPGSGNIKYFEKFKGRVTITADTSTSTAYMELSSLRSEDTAVYYCAGSYYSYDVLDYWGQGTTVTVSSASTKGPSVFPLAPSSKSTSGGTAALGCLVKDYFPEPVTVSWNSGALTSGVHTFPAVLQSSGLYSLSSVVTVPSSSLGTQTYICNVNHKPSNTKVDKKVEPKSC

SEQ ID NO: 879 - protein, 222 aa, synthetic construct
QVQLVQSGAEVKKPGSSVKVSCKASGYSFTTYYIHWVRQAPGQGLEWMGWFFPGSGNIKYGEKFKGRVTITADTSTSTAYMELSSLRSEDTAVYYCAGSYYSYDVLDYWGQGTTVTVSSASTKGPSVFPLAPSSKSTSGGTAALGCLVKDYFPEPVTVSWNSGALTSGVHTFPAVLQSSGLYSLSSVVTVPSSSLGTQTYICNVNHKPSNTKVDKKVEPKSC

SEQ ID NO: 880 - protein, 222 aa, synthetic construct
QVQLVQSGAEVKKPGSSVKVSCKASGYSFTTYYIHWVRQAPGQGLEWMGWFFPGSGNIKYHEKFKGRVTITADTSTSTAYMELSSLRSEDTAVYYCAGSYYSYDVLDYWGQGTTVTVSSASTKGPSVFPLAPSSKSTSGGTAALGCLVKDYFPEPVTVSWNSGALTSGVHTFPAVLQSSGLYSLSSVVTVPSSSLGTQTYICNVNHKPSNTKVDKKVEPKSC

SEQ ID NO: 881 - protein, 222 aa, synthetic construct
QVQLVQSGAEVKKPGSSVKVSCKASGYSFTTYYIHWVRQAPGQGLEWMGWFFPGSGNIKYIEKFKGRVTITADTSTSTAYMELSSLRSEDTAVYYCAGSYYSYDVLDYWGQGTTVTVSSASTKGPSVFPLAPSSKSTSGGTAALGCLVKDYFPEPVTVSWNSGALTSGVHTFPAVLQSSGLYSLSSVVTVPSSSLGTQTYICNVNHKPSNTKVDKKVEPKSC

SEQ ID NO: 882 - protein, 222 aa, synthetic construct
QVQLVQSGAEVKKPGSSVKVSCKASGYSFTTYYIHWVRQAPGQGLEWMGWFFPGSGNIKYKEKFKGRVTITADTSTSTAYMELSSLRSEDTAVYYCAGSYYSYDVLDYWGQGTTVTVSSASTKGPSVFPLAPSSKSTSGGTAALGCLVKDYFPEPVTVSWNSGALTSGVHTFPAVLQSSGLYSLSSVVTVPSSSLGTQTYICNVNHKPSNTKVDKKVEPKSC

SEQ ID NO: 883 - protein, 222 aa, synthetic construct
QVQLVQSGAEVKKPGSSVKVSCKASGYSFTTYYIHWVRQAPGQGLEWMGWFFPGSGNIKYLEKFKGRVTITADTSTSTAYMELSSLRSEDTAVYYCAGSYYSYDVLDYWGQGTTVTVSSASTKGPSVFPLAPSSKSTSGGTAALGCLVKDYFPEPVTVSWNSGALTSGVHTFPAVLQSSGLYSLSSVVTVPSSSLGTQTYICNVNHKPSNTKVDKKVEPKSC

SEQ ID NO: 884 - protein, 222 aa, synthetic construct
QVQLVQSGAEVKKPGSSVKVSCKASGYSFTTYYIHWVRQAPGQGLEWMGWFFPGSGNIKYMEKFKGRVTITADTSTSTAYMELSSLRSEDTAVYYCAGSYYSYDVLDYWGQGTTVTVSSASTKGPSVFPLAPSSKSTSGGTAALGCLVKDYFPEPVTVSWNSGALTSGVHTFPAVLQSSGLYSLSSVVTVPSSSLGTQTYICNVNHKPSNTKVDKKVEPKSC

SEQ ID NO: 885 - protein, 222 aa, synthetic construct
QVQLVQSGAEVKKPGSSVKVSCKASGYSFTTYYIHWVRQAPGQGLEWMGWFFPGSGNIKYPEKFKGRVTITADTSTSTAYMELSSLRSEDTAVYYCAGSYYSYDVLDYWGQGTTVTVSSASTKGPSVFPLAPSSKSTSGGTAALGCLVKDYFPEPVTVSWNSGALTSGVHTFPAVLQSSGLYSLSSVVTVPSSSLGTQTYICNVNHKPSNTKVDKKVEPKSC

SEQ ID NO: 886 - protein, 222 aa, synthetic construct
QVQLVQSGAEVKKPGSSVKVSCKASGYSFTTYYIHWVRQAPGQGLEWMGWFFPGSGNIKYQEKFKGRVTITADTSTSTAYMELSSLRSEDTAVYYCAGSYYSYDVLDYWGQGTTVTVSSASTKGPSVFPLAPSSKSTSGGTAALGCLVKDYFPEPVTVSWNSGALTSGVHTFPAVLQSSGLYSLSSVVTVPSSSLGTQTYICNVNHKPSNTKVDKKVEPKSC

SEQ ID NO: 887 - protein, 222 aa, synthetic construct
QVQLVQSGAEVKKPGSSVKVSCKASGYSFTTYYIHWVRQAPGQGLEWMGWFFPGSGNIKYSEKFKGRVTITADTSTSTAYMELSSLRSEDTAVYYCAGSYYSYDVLDYWGQGTTVTVSSASTKGPSVFPLAPSSKSTSGGTAALGCLVKDYFPEPVTVSWNSGALTSGVHTFPAVLQSSGLYSLSSVVTVPSSSLGTQTYICNVNHKPSNTKVDKKVEPKSC

SEQ ID NO: 888 - protein, 222 aa, synthetic construct
QVQLVQSGAEVKKPGSSVKVSCKASGYSFTTYYIHWVRQAPGQGLEWMGWFFPGSGNIKYTEKFKGRVTITADTSTSTAYMELSSLRSEDTAVYYCAGSYYSYDVLDYWGQGTTVTVSSASTKGPSVFPLAPSSKSTSGGTAALGCLVKDYFPEPVTVSWNSGALTSGVHTFPAVLQSSGLYSLSSVVTVPSSSLGTQTYICNVNHKPSNTKVDKKVEPKSC

SEQ ID NO: 889 - protein, 222 aa, synthetic construct
QVQLVQSGAEVKKPGSSVKVSCKASGYSFTTYYIHWVRQAPGQGLEWMGWFFPGSGNIKYVEKFKGRVTITADTSTSTAYMELSSLRSEDTAVYYCAGSYYSYDVLDYWGQGTTVTVSSASTKGPSVFPLAPSSKSTSGGTAALGCLVKDYFPEPVTVSWNSGALTSGVHTFPAVLQSSGLYSLSSVVTVPSSSLGTQTYICNVNHKPSNTKVDKKVEPKSC

SEQ ID NO: 890 - protein, 222 aa, synthetic construct
QVQLVQSGAEVKKPGSSVKVSCKASGYSFTTYYIHWVRQAPGQGLEWMGWFFPGSGNIKYWEKFKGRVTITADTSTSTAYMELSSLRSEDTAVYYCAGSYYSYDVLDYWGQGTTVTVSSASTKGPSVFPLAPSSKSTSGGTAALGCLVKDYFPEPVTVSWNSGALTSGVHTFPAVLQSSGLYSLSSVVTVPSSSLGTQTYICNVNHKPSNTKVDKKVEPKSC

SEQ ID NO: 891 - protein, 222 aa, synthetic construct
QVQLVQSGAEVKKPGSSVKVSCKASGYSFTTYYIHWVRQAPGQGLEWMGWFFPGSGNIKYYEKFKGRVTITADTSTSTAYMELSSLRSEDTAVYYCAGSYYSYDVLDYWGQGTTVTVSSASTKGPSVFPLAPSSKSTSGGTAALGCLVKDYFPEPVTVSWNSGALTSGVHTFPAVLQSSGLYSLSSVVTVPSSSLGTQTYICNVNHKPSNTKVDKKVEPKSC

SEQ ID NO: 892 - protein, 222 aa, synthetic construct
QVQLVQSGAEVKKPGSSVKVSCKASGYSFTTYYIHWVRQAPGQGLEWMGWFFPGSGNIKYNAKFKGRVTITADTSTSTAYMELSSLRSEDTAVYYCAGSYYSYDVLDYWGQGTTVTVSSASTKGPSVFPLAPSSKSTSGGTAALGCLVKDYFPEPVTVSWNSGALTSGVHTFPAVLQSSGLYSLSSVVTVPSSSLGTQTYICNVNHKPSNTKVDKKVEPKSC

SEQ ID NO: 893 - protein, 222 aa, synthetic construct
QVQLVQSGAEVKKPGSSVKVSCKASGYSFTTYYIHWVRQAPGQGLEWMGWFFPGSGNIKYNDKFKGRVTITADTSTSTAYMELSSLRSEDTAVYYCAGSYYSYDVLDYWGQGTTVTVSSASTKGPSVFPLAPSSKSTSGGTAALGCLVKDYFPEPVTVSWNSGALTSGVHTFPAVLQSSGLYSLSSVVTVPSSSLGTQTYICNVNHKPSNTKVDKKVEPKSC

SEQ ID NO: 894 - protein, 222 aa, synthetic construct
QVQLVQSGAEVKKPGSSVKVSCKASGYSFTTYYIHWVRQAPGQGLEWMGWFFPGSGNIKYNFKFKGRVTITADTSTSTAYMELSSLRSEDTAVYYCAGSYYSYDVLDYWGQGTTVTVSSASTKGPSVFPLAPSSKSTSGGTAALGCLVKDYFPEPVTVSWNSGALTSGVHTFPAVLQSSGLYSLSSVVTVPSSSLGTQTYICNVNHKPSNTKVDKKVEPKSC

SEQ ID NO: 895 - protein, 222 aa, synthetic construct
QVQLVQSGAEVKKPGSSVKVSCKASGYSFTTYYIHWVRQAPGQGLEWMGWFFPGSGNIKYNGKFKGRVTITADTSTSTAYMELSSLRSEDTAVYYCAGSYYSYDVLDYWGQGTTVTVSSASTKGPSVFPLAPSSKSTSGGTAALGCLVKDYFPEPVTVSWNSGALTSGVHTFPAVLQSSGLYSLSSVVTVPSSSLGTQTYICNVNHKPSNTKVDKKVEPKSC

SEQ ID NO: 896 - protein, 222 aa, synthetic construct
QVQLVQSGAEVKKPGSSVKVSCKASGYSFTTYYIHWVRQAPGQGLEWMGWFFPGSGNIKYNHKFKGRVTITADTSTSTAYMELSSLRSEDTAVYYCAGSYYSYDVLDYWGQGTTVTVSSASTKGPSVFPLAPSSKSTSGGTAALGCLVKDYFPEPVTVSWNSGALTSGVHTFPAVLQSSGLYSLSSVVTVPSSSLGTQTYICNVNHKPSNTKVDKKVEPKSC

SEQ ID NO: 897 - protein, 222 aa, synthetic construct
QVQLVQSGAEVKKPGSSVKVSCKASGYSFTTYYIHWVRQAPGQGLEWMGWFFPGSGNIKYNIKFKGRVTITADTSTSTAYMELSSLRSEDTAVYYCAGSYYSYDVLDYWGQGTTVTVSSASTKGPSVFPLAPSSKSTSGGTAALGCLVKDYFPEPVTVSWNSGALTSGVHTFPAVLQSSGLYSLSSVVTVPSSSLGTQTYICNVNHKPSNTKVDKKVEPKSC

SEQ ID NO: 898 - protein, 222 aa, synthetic construct
QVQLVQSGAEVKKPGSSVKVSCKASGYSFTTYYIHWVRQAPGQGLEWMGWFFPGSGNIKYNKKFKGRVTITADTSTSTAYMELSSLRSEDTAVYYCAGSYYSYDVLDYWGQGTTVTVSSASTKGPSVFPLAPSSKSTSGGTAALGCLVKDYFPEPVTVSWNSGALTSGVHTFPAVLQSSGLYSLSSVVTVPSSSLGTQTYICNVNHKPSNTKVDKKVEPKSC

SEQ ID NO: 899 - protein, 222 aa, synthetic construct
QVQLVQSGAEVKKPGSSVKVSCKASGYSFTTYYIHWVRQAPGQGLEWMGWFFPGSGNIKYNLKFKGRVTITADTSTSTAYMELSSLRSEDTAVYYCAGSYYSYDVLDYWGQGTTVTVSSASTKGPSVFPLAPSSKSTSGGTAALGCLVKDYFPEPVTVSWNSGALTSGVHTFPAVLQSSGLYSLSSVVTVPSSSLGTQTYICNVNHKPSNTKVDKKVEPKSC

SEQ ID NO: 900 - protein, 222 aa, synthetic construct
QVQLVQSGAEVKKPGSSVKVSCKASGYSFTTYYIHWVRQAPGQGLEWMGWFFPGSGNIKYNMKFKGRVTITADTSTSTAYMELSSLRSEDTAVYYCAGSYYSYDVLDYWGQGTTVTVSSASTKGPSVFPLAPSSKSTSGGTAALGCLVKDYFPEPVTVSWNSGALTSGVHTFPAVLQSSGLYSLSSVVTVPSSSLGTQTYICNVNHKPSNTKVDKKVEPKSC

SEQ ID NO: 901 - protein, 222 aa, synthetic construct
QVQLVQSGAEVKKPGSSVKVSCKASGYSFTTYYIHWVRQAPGQGLEWMGWFFPGSGNIKYNNKFKGRVTITADTSTSTAYMELSSLRSEDTAVYYCAGSYYSYDVLDYWGQGTTVTVSSASTKGPSVFPLAPSSKSTSGGTAALGCLVKDYFPEPVTVSWNSGALTSGVHTFPAVLQSSGLYSLSSVVTVPSSSLGTQTYICNVNHKPSNTKVDKKVEPKSC

SEQ ID NO: 902 - protein, 222 aa, synthetic construct
QVQLVQSGAEVKKPGSSVKVSCKASGYSFTTYYIHWVRQAPGQGLEWMGWFFPGSGNIKYNPKFKGRVTITADTSTSTAYMELSSLRSEDTAVYYCAGSYYSYDVLDYWGQGTTVTVSSASTKGPSVFPLAPSSKSTSGGTAALGCLVKDYFPEPVTVSWNSGALTSGVHTFPAVLQSSGLYSLSSVVTVPSSSLGTQTYICNVNHKPSNTKVDKKVEPKSC

SEQ ID NO: 903 - protein, 222 aa, synthetic construct
QVQLVQSGAEVKKPGSSVKVSCKASGYSFTTYYIHWVRQAPGQGLEWMGWFFPGSGNIKYNQKFKGRVTITADTSTSTAYMELSSLRSEDTAVYYCAGSYYSYDVLDYWGQGTTVTVSSASTKGPSVFPLAPSSKSTSGGTAALGCLVKDYFPEPVTVSWNSGALTSGVHTFPAVLQSSGLYSLSSVVTVPSSSLGTQTYICNVNHKPSNTKVDKKVEPKSC

SEQ ID NO: 904 - protein, 222 aa, synthetic construct
QVQLVQSGAEVKKPGSSVKVSCKASGYSFTTYYIHWVRQAPGQGLEWMGWFFPGSGNIKYNRKFKGRVTITADTSTSTAYMELSSLRSEDTAVYYCAGSYYSYDVLDYWGQGTTVTVSSASTKGPSVFPLAPSSKSTSGGTAALGCLVKDYFPEPVTVSWNSGALTSGVHTFPAVLQSSGLYSLSSVVTVPSSSLGTQTYICNVNHKPSNTKVDKKVEPKSC

SEQ ID NO: 905 - protein, 222 aa, synthetic construct
QVQLVQSGAEVKKPGSSVKVSCKASGYSFTTYYIHWVRQAPGQGLEWMGWFFPGSGNIKYNSKFKGRVTITADTSTSTAYMELSSLRSEDTAVYYCAGSYYSYDVLDYWGQGTTVTVSSASTKGPSVFPLAPSSKSTSGGTAALGCLVKDYFPEPVTVSWNSGALTSGVHTFPAVLQSSGLYSLSSVVTVPSSSLGTQTYICNVNHKPSNTKVDKKVEPKSC

SEQ ID NO: 906 - protein, 222 aa, synthetic construct
QVQLVQSGAEVKKPGSSVKVSCKASGYSFTTYYIHWVRQAPGQGLEWMGWFFPGSGNIKYNTKFKGRVTITADTSTSTAYMELSSLRSEDTAVYYCAGSYYSYDVLDYWGQGTTVTVSSASTKGPSVFPLAPSSKSTSGGTAALGCLVKDYFPEPVTVSWNSGALTSGVHTFPAVLQSSGLYSLSSVVTVPSSSLGTQTYICNVNHKPSNTKVDKKVEPKSC

SEQ ID NO: 907 - protein, 222 aa, synthetic construct
QVQLVQSGAEVKKPGSSVKVSCKASGYSFTTYYIHWVRQAPGQGLEWMGWFFPGSGNIKYNVKFKGRVTITADTSTSTAYMELSSLRSEDTAVYYCAGSYYSYDVLDYWGQGTTVTVSSASTKGPSVFPLAPSSKSTSGGTAALGCLVKDYFPEPVTVSWNSGALTSGVHTFPAVLQSSGLYSLSSVVTVPSSSLGTQTYICNVNHKPSNTKVDKKVEPKSC

SEQ ID NO: 908 - protein, 222 aa, synthetic construct
QVQLVQSGAEVKKPGSSVKVSCKASGYSFTTYYIHWVRQAPGQGLEWMGWFFPGSGNIKYNWKFKGRVTITADTSTSTAYMELSSLRSEDTAVYYCAGSYYSYDVLDYWGQGTTVTVSSASTKGPSVFPLAPSSKSTSGGTAALGCLVKDYFPEPVTVSWNSGALTSGVHTFPAVLQSSGLYSLSSVVTVPSSSLGTQTYICNVNHKPSNTKVDKKVEPKSC

SEQ ID NO: 909 - protein, 222 aa, synthetic construct
QVQLVQSGAEVKKPGSSVKVSCKASGYSFTTYYIHWVRQAPGQGLEWMGWFFPGSGNIKYNYKFKGRVTITADTSTSTAYMELSSLRSEDTAVYYCAGSYYSYDVLDYWGQGTTVTVSSASTKGPSVFPLAPSSKSTSGGTAALGCLVKDYFPEPVTVSWNSGALTSGVHTFPAVLQSSGLYSLSSVVTVPSSSLGTQTYICNVNHKPSNTKVDKKVEPKSC

SEQ ID NO: 910 - protein, 222 aa, synthetic construct
QVQLVQSGAEVKKPGSSVKVSCKASGYSFTTYYIHWVRQAPGQGLEWMGWFFPGSGNIKYNEKFKGRVTITADTSTSTAYMELSSLRSEDTAVYYCAASYYSYDVLDYWGQGTTVTVSSASTKGPSVFPLAPSSKSTSGGTAALGCLVKDYFPEPVTVSWNSGALTSGVHTFPAVLQSSGLYSLSSVVTVPSSSLGTQTYICNVNHKPSNTKVDKKVEPKSC

SEQ ID NO: 911 - protein, 222 aa, synthetic construct
QVQLVQSGAEVKKPGSSVKVSCKASGYSFTTYYIHWVRQAPGQGLEWMGWFFPGSGNIKYNEKFKGRVTITADTSTSTAYMELSSLRSEDTAVYYCACSYYSYDVLDYWGQGTTVTVSSASTKGPSVFPLAPSSKSTSGGTAALGCLVKDYFPEPVTVSWNSGALTSGVHTFPAVLQSSGLYSLSSVVTVPSSSLGTQTYICNVNHKPSNTKVDKKVEPKSC

SEQ ID NO: 912 - protein, 222 aa, synthetic construct
QVQLVQSGAEVKKPGSSVKVSCKASGYSFTTYYIHWVRQAPGQGLEWMGWFFPGSGNIKYNEKFKGRVTITADTSTSTAYMELSSLRSEDTAVYYCADSYYSYDVLDYWGQGTTVTVSSASTKGPSVFPLAPSSKSTSGGTAALGCLVKDYFPEPVTVSWNSGALTSGVHTFPAVLQSSGLYSLSSVVTVPSSSLGTQTYICNVNHKPSNTKVDKKVEPKSC

SEQ ID NO: 913 - protein, 222 aa, synthetic construct
QVQLVQSGAEVKKPGSSVKVSCKASGYSFTTYYIHWVRQAPGQGLEWMGWFFPGSGNIKYNEKFKGRVTITADTSTSTAYMELSSLRSEDTAVYYCAFSYYSYDVLDYWGQGTTVTVSSASTKGPSVFPLAPSSKSTSGGTAALGCLVKDYFPEPVTVSWNSGALTSGVHTFPAVLQSSGLYSLSSVVTVPSSSLGTQTYICNVNHKPSNTKVDKKVEPKSC

SEQ ID NO: 914 - protein, 222 aa, synthetic construct
QVQLVQSGAEVKKPGSSVKVSCKASGYSFTTYYIHWVRQAPGQGLEWMGWFFPGSGNIKYNEKFKGRVTITADTSTSTAYMELSSLRSEDTAVYYCAISYYSYDVLDYWGQGTTVTVSSASTKGPSVFPLAPSSKSTSGGTAALGCLVKDYFPEPVTVSWNSGALTSGVHTFPAVLQSSGLYSLSSVVTVPSSSLGTQTYICNVNHKPSNTKVDKKVEPKSC

SEQ ID NO: 915 - protein, 222 aa, synthetic construct
QVQLVQSGAEVKKPGSSVKVSCKASGYSFTTYYIHWVRQAPGQGLEWMGWFFPGSGNIKYNEKFKGRVTITADTSTSTAYMELSSLRSEDTAVYYCALSYYSYDVLDYWGQGTTVTVSSASTKGPSVFPLAPSSKSTSGGTAALGCLVKDYFPEPVTVSWNSGALTSGVHTFPAVLQSSGLYSLSSVVTVPSSSLGTQTYICNVNHKPSNTKVDKKVEPKSC

SEQ ID NO: 916 - protein, 222 aa, synthetic construct
QVQLVQSGAEVKKPGSSVKVSCKASGYSFTTYYIHWVRQAPGQGLEWMGWFFPGSGNIKYNEKFKGRVTITADTSTSTAYMELSSLRSEDTAVYYCAMSYYSYDVLDYWGQGTTVTVSSASTKGPSVFPLAPSSKSTSGGTAALGCLVKDYFPEPVTVSWNSGALTSGVHTFPAVLQSSGLYSLSSVVTVPSSSLGTQTYICNVNHKPSNTKVDKKVEPKSC

SEQ ID NO: 917 - protein, 222 aa, synthetic construct
QVQLVQSGAEVKKPGSSVKVSCKASGYSFTTYYIHWVRQAPGQGLEWMGWFFPGSGNIKYNEKFKGRVTITADTSTSTAYMELSSLRSEDTAVYYCANSYYSYDVLDYWGQGTTVTVSSASTKGPSVFPLAPSSKSTSGGTAALGCLVKDYFPEPVTVSWNSGALTSGVHTFPAVLQSSGLYSLSSVVTVPSSSLGTQTYICNVNHKPSNTKVDKKVEPKSC

SEQ ID NO: 918 - protein, 222 aa, synthetic construct
QVQLVQSGAEVKKPGSSVKVSCKASGYSFTTYYIHWVRQAPGQGLEWMGWFFPGSGNIKYNEKFKGRVTITADTSTSTAYMELSSLRSEDTAVYYCAPSYYSYDVLDYWGQGTTVTVSSASTKGPSVFPLAPSSKSTSGGTAALGCLVKDYFPEPVTVSWNSGALTSGVHTFPAVLQSSGLYSLSSVVTVPSSSLGTQTYICNVNHKPSNTKVDKKVEPKSC

SEQ ID NO: 919 - protein, 222 aa, synthetic construct
QVQLVQSGAEVKKPGSSVKVSCKASGYSFTTYYIHWVRQAPGQGLEWMGWFFPGSGNIKYNEKFKGRVTITADTSTSTAYMELSSLRSEDTAVYYCAQSYYSYDVLDYWGQGTTVTVSSASTKGPSVFPLAPSSKSTSGGTAALGCLVKDYFPEPVTVSWNSGALTSGVHTFPAVLQSSGLYSLSSVVTVPSSSLGTQTYICNVNHKPSNTKVDKKVEPKSC

SEQ ID NO: 920 - protein, 222 aa, synthetic construct
QVQLVQSGAEVKKPGSSVKVSCKASGYSFTTYYIHWVRQAPGQGLEWMGWFFPGSGNIKYNEKFKGRVTITADTSTSTAYMELSSLRSEDTAVYYCARSYYSYDVLDYWGQGTTVTVSSASTKGPSVFPLAPSSKSTSGGTAALGCLVKDYFPEPVTVSWNSGALTSGVHTFPAVLQSSGLYSLSSVVTVPSSSLGTQTYICNVNHKPSNTKVDKKVEPKSC

SEQ ID NO: 921 - protein, 222 aa, synthetic construct
QVQLVQSGAEVKKPGSSVKVSCKASGYSFTTYYIHWVRQAPGQGLEWMGWFFPGSGNIKYNEKFKGRVTITADTSTSTAYMELSSLRSEDTAVYYCAVSYYSYDVLDYWGQGTTVTVSSASTKGPSVFPLAPSSKSTSGGTAALGCLVKDYFPEPVTVSWNSGALTSGVHTFPAVLQSSGLYSLSSVVTVPSSSLGTQTYICNVNHKPSNTKVDKKVEPKSC

SEQ ID NO: 922 - protein, 222 aa, synthetic construct
QVQLVQSGAEVKKPGSSVKVSCKASGYSFTTYYIHWVRQAPGQGLEWMGWFFPGSGNIKYNEKFKGRVTITADTSTSTAYMELSSLRSEDTAVYYCAWSYYSYDVLDYWGQGTTVTVSSASTKGPSVFPLAPSSKSTSGGTAALGCLVKDYFPEPVTVSWNSGALTSGVHTFPAVLQSSGLYSLSSVVTVPSSSLGTQTYICNVNHKPSNTKVDKKVEPKSC

SEQ ID NO: 923 - protein, 222 aa, synthetic construct
QVQLVQSGAEVKKPGSSVKVSCKASGYSFTTYYIHWVRQAPGQGLEWMGWFFPGSGNIKYNEKFKGRVTITADTSTSTAYMELSSLRSEDTAVYYCAGAYYSYDVLDYWGQGTTVTVSSASTKGPSVFPLAPSSKSTSGGTAALGCLVKDYFPEPVTVSWNSGALTSGVHTFPAVLQSSGLYSLSSVVTVPSSSLGTQTYICNVNHKPSNTKVDKKVEPKSC

SEQ ID NO: 924 - protein, 222 aa, synthetic construct
QVQLVQSGAEVKKPGSSVKVSCKASGYSFTTYYIHWVRQAPGQGLEWMGWFFPGSGNIKYNEKFKGRVTITADTSTSTAYMELSSLRSEDTAVYYCAGDYYSYDVLDYWGQGTTVTVSSASTKGPSVFPLAPSSKSTSGGTAALGCLVKDYFPEPVTVSWNSGALTSGVHTFPAVLQSSGLYSLSSVVTVPSSSLGTQTYICNVNHKPSNTKVDKKVEPKSC

SEQ ID NO: 925 - protein, 222 aa, synthetic construct
QVQLVQSGAEVKKPGSSVKVSCKASGYSFTTYYIHWVRQAPGQGLEWMGWFFPGSGNIKYNEKFKGRVTITADTSTSTAYMELSSLRSEDTAVYYCAGEYYSYDVLDYWGQGTTVTVSSASTKGPSVFPLAPSSKSTSGGTAALGCLVKDYFPEPVTVSWNSGALTSGVHTFPAVLQSSGLYSLSSVVTVPSSSLGTQTYICNVNHKPSNTKVDKKVEPKSC

SEQ ID NO: 926 - protein, 222 aa, synthetic construct
QVQLVQSGAEVKKPGSSVKVSCKASGYSFTTYYIHWVRQAPGQGLEWMGWFFPGSGNIKYNEKFKGRVTITADTSTSTAYMELSSLRSEDTAVYYCAGFYYSYDVLDYWGQGTTVTVSSASTKGPSVFPLAPSSKSTSGGTAALGCLVKDYFPEPVTVSWNSGALTSGVHTFPAVLQSSGLYSLSSVVTVPSSSLGTQTYICNVNHKPSNTKVDKKVEPKSC

SEQ ID NO: 927 - protein, 222 aa, synthetic construct
QVQLVQSGAEVKKPGSSVKVSCKASGYSFTTYYIHWVRQAPGQGLEWMGWFFPGSGNIKYNEKFKGRVTITADTSTSTAYMELSSLRSEDTAVYYCAGGYYSYDVLDYWGQGTTVTVSSASTKGPSVFPLAPSSKSTSGGTAALGCLVKDYFPEPVTVSWNSGALTSGVHTFPAVLQSSGLYSLSSVVTVPSSSLGTQTYICNVNHKPSNTKVDKKVEPKSC

SEQ ID NO: 928 - protein, 222 aa, synthetic construct
QVQLVQSGAEVKKPGSSVKVSCKASGYSFTTYYIHWVRQAPGQGLEWMGWFFPGSGNIKYNEKFKGRVTITADTSTSTAYMELSSLRSEDTAVYYCAGHYYSYDVLDYWGQGTTVTVSSASTKGPSVFPLAPSSKSTSGGTAALGCLVKDYFPEPVTVSWNSGALTSGVHTFPAVLQSSGLYSLSSVVTVPSSSLGTQTYICNVNHKPSNTKVDKKVEPKSC

SEQ ID NO: 929 - protein, 222 aa, synthetic construct
QVQLVQSGAEVKKPGSSVKVSCKASGYSFTTYYIHWVRQAPGQGLEWMGWFFPGSGNIKYNEKFKGRVTITADTSTSTAYMELSSLRSEDTAVYYCAGIYYSYDVLDYWGQGTTVTVSSASTKGPSVFPLAPSSKSTSGGTAALGCLVKDYFPEPVTVSWNSGALTSGVHTFPAVLQSSGLYSLSSVVTVPSSSLGTQTYICNVNHKPSNTKVDKKVEPKSC

SEQ ID NO: 930 - protein, 222 aa, synthetic construct
QVQLVQSGAEVKKPGSSVKVSCKASGYSFTTYYIHWVRQAPGQGLEWMGWFFPGSGNIKYNEKFKGRVTITADTSTSTAYMELSSLRSEDTAVYYCAGKYYSYDVLDYWGQGTTVTVSSASTKGPSVFPLAPSSKSTSGGTAALGCLVKDYFPEPVTVSWNSGALTSGVHTFPAVLQSSGLYSLSSVVTVPSSSLGTQTYICNVNHKPSNTKVDKKVEPKSC

SEQ ID NO: 931 - protein, 222 aa, synthetic construct
QVQLVQSGAEVKKPGSSVKVSCKASGYSFTTYYIHWVRQAPGQGLEWMGWFFPGSGNIKYNEKFKGRVTITADTSTSTAYMELSSLRSEDTAVYYCAGLYYSYDVLDYWGQGTTVTVSSASTKGPSVFPLAPSSKSTSGGTAALGCLVKDYFPEPVTVSWNSGALTSGVHTFPAVLQSSGLYSLSSVVTVPSSSLGTQTYICNVNHKPSNTKVDKKVEPKSC

SEQ ID NO: 932 - protein, 222 aa, synthetic construct
QVQLVQSGAEVKKPGSSVKVSCKASGYSFTTYYIHWVRQAPGQGLEWMGWFFPGSGNIKYNEKFKGRVTITADTSTSTAYMELSSLRSEDTAVYYCAGMYYSYDVLDYWGQGTTVTVSSASTKGPSVFPLAPSSKSTSGGTAALGCLVKDYFPEPVTVSWNSGALTSGVHTFPAVLQSSGLYSLSSVVTVPSSSLGTQTYICNVNHKPSNTKVDKKVEPKSC

SEQ ID NO: 933 - protein, 222 aa, synthetic construct
QVQLVQSGAEVKKPGSSVKVSCKASGYSFTTYYIHWVRQAPGQGLEWMGWFFPGSGNIKYNEKFKGRVTITADTSTSTAYMELSSLRSEDTAVYYCAGNYYSYDVLDYWGQGTTVTVSSASTKGPSVFPLAPSSKSTSGGTAALGCLVKDYFPEPVTVSWNSGALTSGVHTFPAVLQSSGLYSLSSVVTVPSSSLGTQTYICNVNHKPSNTKVDKKVEPKSC

SEQ ID NO: 934 - protein, 222 aa, synthetic construct
QVQLVQSGAEVKKPGSSVKVSCKASGYSFTTYYIHWVRQAPGQGLEWMGWFFPGSGNIKYNEKFKGRVTITADTSTSTAYMELSSLRSEDTAVYYCAGPYYSYDVLDYWGQGTTVTVSSASTKGPSVFPLAPSSKSTSGGTAALGCLVKDYFPEPVTVSWNSGALTSGVHTFPAVLQSSGLYSLSSVVTVPSSSLGTQTYICNVNHKPSNTKVDKKVEPKSC

SEQ ID NO: 935 - protein, 222 aa, synthetic construct
QVQLVQSGAEVKKPGSSVKVSCKASGYSFTTYYIHWVRQAPGQGLEWMGWFFPGSGNIKYNEKFKGRVTITADTSTSTAYMELSSLRSEDTAVYYCAGRYYSYDVLDYWGQGTTVTVSSASTKGPSVFPLAPSSKSTSGGTAALGCLVKDYFPEPVTVSWNSGALTSGVHTFPAVLQSSGLYSLSSVVTVPSSSLGTQTYICNVNHKPSNTKVDKKVEPKSC

SEQ ID NO: 936 - protein, 222 aa, synthetic construct
QVQLVQSGAEVKKPGSSVKVSCKASGYSFTTYYIHWVRQAPGQGLEWMGWFFPGSGNIKYNEKFKGRVTITADTSTSTAYMELSSLRSEDTAVYYCAGVYYSYDVLDYWGQGTTVTVSSASTKGPSVFPLAPSSKSTSGGTAALGCLVKDYFPEPVTVSWNSGALTSGVHTFPAVLQSSGLYSLSSVVTVPSSSLGTQTYICNVNHKPSNTKVDKKVEPKSC

SEQ ID NO: 937 - protein, 222 aa, synthetic construct
QVQLVQSGAEVKKPGSSVKVSCKASGYSFTTYYIHWVRQAPGQGLEWMGWFFPGSGNIKYNEKFKGRVTITADTSTSTAYMELSSLRSEDTAVYYCAGWYYSYDVLDYWGQGTTVTVSSASTKGPSVFPLAPSSKSTSGGTAALGCLVKDYFPEPVTVSWNSGALTSGVHTFPAVLQSSGLYSLSSVVTVPSSSLGTQTYICNVNHKPSNTKVDKKVEPKSC

SEQ ID NO: 938 - protein, 222 aa, synthetic construct
QVQLVQSGAEVKKPGSSVKVSCKASGYSFTTYYIHWVRQAPGQGLEWMGWFFPGSGNIKYNEKFKGRVTITADTSTSTAYMELSSLRSEDTAVYYCAGYYYSYDVLDYWGQGTTVTVSSASTKGPSVFPLAPSSKSTSGGTAALGCLVKDYFPEPVTVSWNSGALTSGVHTFPAVLQSSGLYSLSSVVTVPSSSLGTQTYICNVNHKPSNTKVDKKVEPKSC

SEQ ID NO: 939 - protein, 222 aa, synthetic construct
QVQLVQSGAEVKKPGSSVKVSCKASGYSFTTYYIHWVRQAPGQGLEWMGWFFPGSGNIKYNEKFKGRVTITADTSTSTAYMELSSLRSEDTAVYYCAGSAYSYDVLDYWGQGTTVTVSSASTKGPSVFPLAPSSKSTSGGTAALGCLVKDYFPEPVTVSWNSGALTSGVHTFPAVLQSSGLYSLSSVVTVPSSSLGTQTYICNVNHKPSNTKVDKKVEPKSC

SEQ ID NO: 940 - protein, 222 aa, synthetic construct
QVQLVQSGAEVKKPGSSVKVSCKASGYSFTTYYIHWVRQAPGQGLEWMGWFFPGSGNIKYNEKFKGRVTITADTSTSTAYMELSSLRSEDTAVYYCAGSDYSYDVLDYWGQGTTVTVSSASTKGPSVFPLAPSSKSTSGGTAALGCLVKDYFPEPVTVSWNSGALTSGVHTFPAVLQSSGLYSLSSVVTVPSSSLGTQTYICNVNHKPSNTKVDKKVEPKSC

SEQ ID NO: 941 - protein, 222 aa, synthetic construct
QVQLVQSGAEVKKPGSSVKVSCKASGYSFTTYYIHWVRQAPGQGLEWMGWFFPGSGNIKYNEKFKGRVTITADTSTSTAYMELSSLRSEDTAVYYCAGSEYSYDVLDYWGQGTTVTVSSASTKGPSVFPLAPSSKSTSGGTAALGCLVKDYFPEPVTVSWNSGALTSGVHTFPAVLQSSGLYSLSSVVTVPSSSLGTQTYICNVNHKPSNTKVDKKVEPKSC

SEQ ID NO: 942 - protein, 222 aa, synthetic construct
QVQLVQSGAEVKKPGSSVKVSCKASGYSFTTYYIHWVRQAPGQGLEWMGWFFPGSGNIKYNEKFKGRVTITADTSTSTAYMELSSLRSEDTAVYYCAGSFYSYDVLDYWGQGTTVTVSSASTKGPSVFPLAPSSKSTSGGTAALGCLVKDYFPEPVTVSWNSGALTSGVHTFPAVLQSSGLYSLSSVVTVPSSSLGTQTYICNVNHKPSNTKVDKKVEPKSC

SEQ ID NO: 943 - protein, 222 aa, synthetic construct
QVQLVQSGAEVKKPGSSVKVSCKASGYSFTTYYIHWVRQAPGQGLEWMGWFFPGSGNIKYNEKFKGRVTITADTSTSTAYMELSSLRSEDTAVYYCAGSHYSYDVLDYWGQGTTVTVSSASTKGPSVFPLAPSSKSTSGGTAALGCLVKDYFPEPVTVSWNSGALTSGVHTFPAVLQSSGLYSLSSVVTVPSSSLGTQTYICNVNHKPSNTKVDKKVEPKSC

SEQ ID NO: 944 - protein, 222 aa, synthetic construct
QVQLVQSGAEVKKPGSSVKVSCKASGYSFTTYYIHWVRQAPGQGLEWMGWFFPGSGNIKYNEKFKGRVTITADTSTSTAYMELSSLRSEDTAVYYCAGSIYSYDVLDYWGQGTTVTVSSASTKGPSVFPLAPSSKSTSGGTAALGCLVKDYFPEPVTVSWNSGALTSGVHTFPAVLQSSGLYSLSSVVTVPSSSLGTQTYICNVNHKPSNTKVDKKVEPKSC

SEQ ID NO: 945 - protein, 222 aa, synthetic construct
QVQLVQSGAEVKKPGSSVKVSCKASGYSFTTYYIHWVRQAPGQGLEWMGWFFPGSGNIKYNEKFKGRVTITADTSTSTAYMELSSLRSEDTAVYYCAGSKYSYDVLDYWGQGTTVTVSSASTKGPSVFPLAPSSKSTSGGTAALGCLVKDYFPEPVTVSWNSGALTSGVHTFPAVLQSSGLYSLSSVVTVPSSSLGTQTYICNVNHKPSNTKVDKKVEPKSC

SEQ ID NO: 946 - protein, 222 aa, synthetic construct
QVQLVQSGAEVKKPGSSVKVSCKASGYSFTTYYIHWVRQAPGQGLEWMGWFFPGSGNIKYNEKFKGRVTITADTSTSTAYMELSSLRSEDTAVYYCAGSLYSYDVLDYWGQGTTVTVSSASTKGPSVFPLAPSSKSTSGGTAALGCLVKDYFPEPVTVSWNSGALTSGVHTFPAVLQSSGLYSLSSVVTVPSSSLGTQTYICNVNHKPSNTKVDKKVEPKSC

SEQ ID NO: 947 - protein, 222 aa, synthetic construct
QVQLVQSGAEVKKPGSSVKVSCKASGYSFTTYYIHWVRQAPGQGLEWMGWFFPGSGNIKYNEKFKGRVTITADTSTSTAYMELSSLRSEDTAVYYCAGSMYSYDVLDYWGQGTTVTVSSASTKGPSVFPLAPSSKSTSGGTAALGCLVKDYFPEPVTVSWNSGALTSGVHTFPAVLQSSGLYSLSSVVTVPSSSLGTQTYICNVNHKPSNTKVDKKVEPKSC

SEQ ID NO: 948 - protein, 222 aa, synthetic construct
QVQLVQSGAEVKKPGSSVKVSCKASGYSFTTYYIHWVRQAPGQGLEWMGWFFPGSGNIKYNEKFKGRVTITADTSTSTAYMELSSLRSEDTAVYYCAGSNYSYDVLDYWGQGTTVTVSSASTKGPSVFPLAPSSKSTSGGTAALGCLVKDYFPEPVTVSWNSGALTSGVHTFPAVLQSSGLYSLSSVVTVPSSSLGTQTYICNVNHKPSNTKVDKKVEPKSC

SEQ ID NO: 949 - protein, 222 aa, synthetic construct
QVQLVQSGAEVKKPGSSVKVSCKASGYSFTTYYIHWVRQAPGQGLEWMGWFFPGSGNIKYNEKFKGRVTITADTSTSTAYMELSSLRSEDTAVYYCAGSPYSYDVLDYWGQGTTVTVSSASTKGPSVFPLAPSSKSTSGGTAALGCLVKDYFPEPVTVSWNSGALTSGVHTFPAVLQSSGLYSLSSVVTVPSSSLGTQTYICNVNHKPSNTKVDKKVEPKSC

SEQ ID NO: 950 - protein, 222 aa, synthetic construct
QVQLVQSGAEVKKPGSSVKVSCKASGYSFTTYYIHWVRQAPGQGLEWMGWFFPGSGNIKYNEKFKGRVTITADTSTSTAYMELSSLRSEDTAVYYCAGSQYSYDVLDYWGQGTTVTVSSASTKGPSVFPLAPSSKSTSGGTAALGCLVKDYFPEPVTVSWNSGALTSGVHTFPAVLQSSGLYSLSSVVTVPSSSLGTQTYICNVNHKPSNTKVDKKVEPKSC

SEQ ID NO: 951 - protein, 222 aa, synthetic construct
QVQLVQSGAEVKKPGSSVKVSCKASGYSFTTYYIHWVRQAPGQGLEWMGWFFPGSGNIKYNEKFKGRVTITADTSTSTAYMELSSLRSEDTAVYYCAGSRYSYDVLDYWGQGTTVTVSSASTKGPSVFPLAPSSKSTSGGTAALGCLVKDYFPEPVTVSWNSGALTSGVHTFPAVLQSSGLYSLSSVVTVPSSSLGTQTYICNVNHKPSNTKVDKKVEPKSC

SEQ ID NO: 952 - protein, 222 aa, synthetic construct
QVQLVQSGAEVKKPGSSVKVSCKASGYSFTTYYIHWVRQAPGQGLEWMGWFFPGSGNIKYNEKFKGRVTITADTSTSTAYMELSSLRSEDTAVYYCAGSSYSYDVLDYWGQGTTVTVSSASTKGPSVFPLAPSSKSTSGGTAALGCLVKDYFPEPVTVSWNSGALTSGVHTFPAVLQSSGLYSLSSVVTVPSSSLGTQTYICNVNHKPSNTKVDKKVEPKSC

SEQ ID NO: 953 - protein, 222 aa, synthetic construct
QVQLVQSGAEVKKPGSSVKVSCKASGYSFTTYYIHWVRQAPGQGLEWMGWFFPGSGNIKYNEKFKGRVTITADTSTSTAYMELSSLRSEDTAVYYCAGSTYSYDVLDYWGQGTTVTVSSASTKGPSVFPLAPSSKSTSGGTAALGCLVKDYFPEPVTVSWNSGALTSGVHTFPAVLQSSGLYSLSSVVTVPSSSLGTQTYICNVNHKPSNTKVDKKVEPKSC

SEQ ID NO: 954 - protein, 222 aa, synthetic construct
QVQLVQSGAEVKKPGSSVKVSCKASGYSFTTYYIHWVRQAPGQGLEWMGWFFPGSGNIKYNEKFKGRVTITADTSTSTAYMELSSLRSEDTAVYYCAGSVYSYDVLDYWGQGTTVTVSSASTKGPSVFPLAPSSKSTSGGTAALGCLVKDYFPEPVTVSWNSGALTSGVHTFPAVLQSSGLYSLSSVVTVPSSSLGTQTYICNVNHKPSNTKVDKKVEPKSC

SEQ ID NO: 955 - protein, 222 aa, synthetic construct
QVQLVQSGAEVKKPGSSVKVSCKASGYSFTTYYIHWVRQAPGQGLEWMGWFFPGSGNIKYNEKFKGRVTITADTSTSTAYMELSSLRSEDTAVYYCAGSWYSYDVLDYWGQGTTVTVSSASTKGPSVFPLAPSSKSTSGGTAALGCLVKDYFPEPVTVSWNSGALTSGVHTFPAVLQSSGLYSLSSVVTVPSSSLGTQTYICNVNHKPSNTKVDKKVEPKSC

SEQ ID NO: 956 - protein, 222 aa, synthetic construct
QVQLVQSGAEVKKPGSSVKVSCKASGYSFTTYYIHWVRQAPGQGLEWMGWFFPGSGNIKYNEKFKGRVTITADTSTSTAYMELSSLRSEDTAVYYCAGSYASYDVLDYWGQGTTVTVSSASTKGPSVFPLAPSSKSTSGGTAALGCLVKDYFPEPVTVSWNSGALTSGVHTFPAVLQSSGLYSLSSVVTVPSSSLGTQTYICNVNHKPSNTKVDKKVEPKSC

SEQ ID NO: 957 - protein, 222 aa, synthetic construct
QVQLVQSGAEVKKPGSSVKVSCKASGYSFTTYYIHWVRQAPGQGLEWMGWFFPGSGNIKYNEKFKGRVTITADTSTSTAYMELSSLRSEDTAVYYCAGSYDSYDVLDYWGQGTTVTVSSASTKGPSVFPLAPSSKSTSGGTAALGCLVKDYFPEPVTVSWNSGALTSGVHTFPAVLQSSGLYSLSSVVTVPSSSLGTQTYICNVNHKPSNTKVDKKVEPKSC

SEQ ID NO: 958 - protein, 222 aa, synthetic construct
QVQLVQSGAEVKKPGSSVKVSCKASGYSFTTYYIHWVRQAPGQGLEWMGWFFPGSGNIKYNEKFKGRVTITADTSTSTAYMELSSLRSEDTAVYYCAGSYESYDVLDYWGQGTTVTVSSASTKGPSVFPLAPSSKSTSGGTAALGCLVKDYFPEPVTVSWNSGALTSGVHTFPAVLQSSGLYSLSSVVTVPSSSLGTQTYICNVNHKPSNTKVDKKVEPKSC

SEQ ID NO: 959 - protein, 222 aa, synthetic construct
QVQLVQSGAEVKKPGSSVKVSCKASGYSFTTYYIHWVRQAPGQGLEWMGWFFPGSGNIKYNEKFKGRVTITADTSTSTAYMELSSLRSEDTAVYYCAGSYFSYDVLDYWGQGTTVTVSSASTKGPSVFPLAPSSKSTSGGTAALGCLVKDYFPEPVTVSWNSGALTSGVHTFPAVLQSSGLYSLSSVVTVPSSSLGTQTYICNVNHKPSNTKVDKKVEPKSC

SEQ ID NO: 960 - protein, 222 aa, synthetic construct
QVQLVQSGAEVKKPGSSVKVSCKASGYSFTTYYIHWVRQAPGQGLEWMGWFFPGSGNIKYNEKFKGRVTITADTSTSTAYMELSSLRSEDTAVYYCAGSYHSYDVLDYWGQGTTVTVSSASTKGPSVFPLAPSSKSTSGGTAALGCLVKDYFPEPVTVSWNSGALTSGVHTFPAVLQSSGLYSLSSVVTVPSSSLGTQTYICNVNHKPSNTKVDKKVEPKSC

SEQ ID NO: 961 - protein, 222 aa, synthetic construct
QVQLVQSGAEVKKPGSSVKVSCKASGYSFTTYYIHWVRQAPGQGLEWMGWFFPGSGNIKYNEKFKGRVTITADTSTSTAYMELSSLRSEDTAVYYCAGSYISYDVLDYWGQGTTVTVSSASTKGPSVFPLAPSSKSTSGGTAALGCLVKDYFPEPVTVSWNSGALTSGVHTFPAVLQSSGLYSLSSVVTVPSSSLGTQTYICNVNHKPSNTKVDKKVEPKSC

SEQ ID NO: 962 - protein, 222 aa, synthetic construct
QVQLVQSGAEVKKPGSSVKVSCKASGYSFTTYYIHWVRQAPGQGLEWMGWFFPGSGNIKYNEKFKGRVTITADTSTSTAYMELSSLRSEDTAVYYCAGSYKSYDVLDYWGQGTTVTVSSASTKGPSVFPLAPSSKSTSGGTAALGCLVKDYFPEPVTVSWNSGALTSGVHTFPAVLQSSGLYSLSSVVTVPSSSLGTQTYICNVNHKPSNTKVDKKVEPKSC

SEQ ID NO: 963 - protein, 222 aa, synthetic construct
QVQLVQSGAEVKKPGSSVKVSCKASGYSFTTYYIHWVRQAPGQGLEWMGWFFPGSGNIKYNEKFKGRVTITADTSTSTAYMELSSLRSEDTAVYYCAGSYLSYDVLDYWGQGTTVTVSSASTKGPSVFPLAPSSKSTSGGTAALGCLVKDYFPEPVTVSWNSGALTSGVHTFPAVLQSSGLYSLSSVVTVPSSSLGTQTYICNVNHKPSNTKVDKKVEPKSC

SEQ ID NO: 964 - protein, 222 aa, synthetic construct
QVQLVQSGAEVKKPGSSVKVSCKASGYSFTTYYIHWVRQAPGQGLEWMGWFFPGSGNIKYNEKFKGRVTITADTSTSTAYMELSSLRSEDTAVYYCAGSYMSYDVLDYWGQGTTVTVSSASTKGPSVFPLAPSSKSTSGGTAALGCLVKDYFPEPVTVSWNSGALTSGVHTFPAVLQSSGLYSLSSVVTVPSSSLGTQTYICNVNHKPSNTKVDKKVEPKSC

SEQ ID NO: 965 - protein, 222 aa, synthetic construct
QVQLVQSGAEVKKPGSSVKVSCKASGYSFTTYYIHWVRQAPGQGLEWMGWFFPGSGNIKYNEKFKGRVTITADTSTSTAYMELSSLRSEDTAVYYCAGSYNSYDVLDYWGQGTTVTVSSASTKGPSVFPLAPSSKSTSGGTAALGCLVKDYFPEPVTVSWNSGALTSGVHTFPAVLQSSGLYSLSSVVTVPSSSLGTQTYICNVNHKPSNTKVDKKVEPKSC

SEQ ID NO: 966 - protein, 222 aa, synthetic construct
QVQLVQSGAEVKKPGSSVKVSCKASGYSFTTYYIHWVRQAPGQGLEWMGWFFPGSGNIKYNEKFKGRVTITADTSTSTAYMELSSLRSEDTAVYYCAGSYPSYDVLDYWGQGTTVTVSSASTKGPSVFPLAPSSKSTSGGTAALGCLVKDYFPEPVTVSWNSGALTSGVHTFPAVLQSSGLYSLSSVVTVPSSSLGTQTYICNVNHKPSNTKVDKKVEPKSC

SEQ ID NO: 967 - protein, 222 aa, synthetic construct
QVQLVQSGAEVKKPGSSVKVSCKASGYSFTTYYIHWVRQAPGQGLEWMGWFFPGSGNIKYNEKFKGRVTITADTSTSTAYMELSSLRSEDTAVYYCAGSYQSYDVLDYWGQGTTVTVSSASTKGPSVFPLAPSSKSTSGGTAALGCLVKDYFPEPVTVSWNSGALTSGVHTFPAVLQSSGLYSLSSVVTVPSSSLGTQTYICNVNHKPSNTKVDKKVEPKSC

SEQ ID NO: 968 - protein, 222 aa, synthetic construct
QVQLVQSGAEVKKPGSSVKVSCKASGYSFTTYYIHWVRQAPGQGLEWMGWFFPGSGNIKYNEKFKGRVTITADTSTSTAYMELSSLRSEDTAVYYCAGSYSSYDVLDYWGQGTTVTVSSASTKGPSVFPLAPSSKSTSGGTAALGCLVKDYFPEPVTVSWNSGALTSGVHTFPAVLQSSGLYSLSSVVTVPSSSLGTQTYICNVNHKPSNTKVDKKVEPKSC

SEQ ID NO: 969 - protein, 222 aa, synthetic construct
QVQLVQSGAEVKKPGSSVKVSCKASGYSFTTYYIHWVRQAPGQGLEWMGWFFPGSGNIKYNEKFKGRVTITADTSTSTAYMELSSLRSEDTAVYYCAGSYTSYDVLDYWGQGTTVTVSSASTKGPSVFPLAPSSKSTSGGTAALGCLVKDYFPEPVTVSWNSGALTSGVHTFPAVLQSSGLYSLSSVVTVPSSSLGTQTYICNVNHKPSNTKVDKKVEPKSC

SEQ ID NO: 970 - protein, 222 aa, synthetic construct
QVQLVQSGAEVKKPGSSVKVSCKASGYSFTTYYIHWVRQAPGQGLEWMGWFFPGSGNIKYNEKFKGRVTITADTSTSTAYMELSSLRSEDTAVYYCAGSYVSYDVLDYWGQGTTVTVSSASTKGPSVFPLAPSSKSTSGGTAALGCLVKDYFPEPVTVSWNSGALTSGVHTFPAVLQSSGLYSLSSVVTVPSSSLGTQTYICNVNHKPSNTKVDKKVEPKSC

SEQ ID NO: 971 - protein, 222 aa, synthetic construct
QVQLVQSGAEVKKPGSSVKVSCKASGYSFTTYYIHWVRQAPGQGLEWMGWFFPGSGNIKYNEKFKGRVTITADTSTSTAYMELSSLRSEDTAVYYCAGSYWSYDVLDYWGQGTTVTVSSASTKGPSVFPLAPSSKSTSGGTAALGCLVKDYFPEPVTVSWNSGALTSGVHTFPAVLQSSGLYSLSSVVTVPSSSLGTQTYICNVNHKPSNTKVDKKVEPKSC

SEQ ID NO: 972 - protein, 222 aa, synthetic construct
QVQLVQSGAEVKKPGSSVKVSCKASGYSFTTYYIHWVRQAPGQGLEWMGWFFPGSGNIKYNEKFKGRVTITADTSTSTAYMELSSLRSEDTAVYYCAGSYYAYDVLDYWGQGTTVTVSSASTKGPSVFPLAPSSKSTSGGTAALGCLVKDYFPEPVTVSWNSGALTSGVHTFPAVLQSSGLYSLSSVVTVPSSSLGTQTYICNVNHKPSNTKVDKKVEPKSC

SEQ ID NO: 973 - protein, 222 aa, synthetic construct
QVQLVQSGAEVKKPGSSVKVSCKASGYSFTTYYIHWVRQAPGQGLEWMGWFFPGSGNIKYNEKFKGRVTITADTSTSTAYMELSSLRSEDTAVYYCAGSYYDYDVLDYWGQGTTVTVSSASTKGPSVFPLAPSSKSTSGGTAALGCLVKDYFPEPVTVSWNSGALTSGVHTFPAVLQSSGLYSLSSVVTVPSSSLGTQTYICNVNHKPSNTKVDKKVEPKSC

SEQ ID NO: 974 - protein, 222 aa, synthetic construct
QVQLVQSGAEVKKPGSSVKVSCKASGYSFTTYYIHWVRQAPGQGLEWMGWFFPGSGNIKYNEKFKGRVTITADTSTSTAYMELSSLRSEDTAVYYCAGSYYEYDVLDYWGQGTTVTVSSASTKGPSVFPLAPSSKSTSGGTAALGCLVKDYFPEPVTVSWNSGALTSGVHTFPAVLQSSGLYSLSSVVTVPSSSLGTQTYICNVNHKPSNTKVDKKVEPKSC

SEQ ID NO: 975 - protein, 222 aa, synthetic construct
QVQLVQSGAEVKKPGSSVKVSCKASGYSFTTYYIHWVRQAPGQGLEWMGWFFPGSGNIKYNEKFKGRVTITADTSTSTAYMELSSLRSEDTAVYYCAGSYYFYDVLDYWGQGTTVTVSSASTKGPSVFPLAPSSKSTSGGTAALGCLVKDYFPEPVTVSWNSGALTSGVHTFPAVLQSSGLYSLSSVVTVPSSSLGTQTYICNVNHKPSNTKVDKKVEPKSC

SEQ ID NO: 976 - protein, 222 aa, synthetic construct
QVQLVQSGAEVKKPGSSVKVSCKASGYSFTTYYIHWVRQAPGQGLEWMGWFFPGSGNIKYNEKFKGRVTITADTSTSTAYMELSSLRSEDTAVYYCAGSYYGYDVLDYWGQGTTVTVSSASTKGPSVFPLAPSSKSTSGGTAALGCLVKDYFPEPVTVSWNSGALTSGVHTFPAVLQSSGLYSLSSVVTVPSSSLGTQTYICNVNHKPSNTKVDKKVEPKSC

SEQ ID NO: 977 - protein, 222 aa, synthetic construct
QVQLVQSGAEVKKPGSSVKVSCKASGYSFTTYYIHWVRQAPGQGLEWMGWFFPGSGNIKYNEKFKGRVTITADTSTSTAYMELSSLRSEDTAVYYCAGSYYHYDVLDYWGQGTTVTVSSASTKGPSVFPLAPSSKSTSGGTAALGCLVKDYFPEPVTVSWNSGALTSGVHTFPAVLQSSGLYSLSSVVTVPSSSLGTQTYICNVNHKPSNTKVDKKVEPKSC

SEQ ID NO: 978 - protein, 222 aa, synthetic construct
QVQLVQSGAEVKKPGSSVKVSCKASGYSFTTYYIHWVRQAPGQGLEWMGWFFPGSGNIKYNEKFKGRVTITADTSTSTAYMELSSLRSEDTAVYYCAGSYYIYDVLDYWGQGTTVTVSSASTKGPSVFPLAPSSKSTSGGTAALGCLVKDYFPEPVTVSWNSGALTSGVHTFPAVLQSSGLYSLSSVVTVPSSSLGTQTYICNVNHKPSNTKVDKKVEPKSC

SEQ ID NO: 979 - protein, 222 aa, synthetic construct
QVQLVQSGAEVKKPGSSVKVSCKASGYSFTTYYIHWVRQAPGQGLEWMGWFFPGSGNIKYNEKFKGRVTITADTSTSTAYMELSSLRSEDTAVYYCAGSYYLYDVLDYWGQGTTVTVSSASTKGPSVFPLAPSSKSTSGGTAALGCLVKDYFPEPVTVSWNSGALTSGVHTFPAVLQSSGLYSLSSVVTVPSSSLGTQTYICNVNHKPSNTKVDKKVEPKSC

SEQ ID NO: 980 - protein, 222 aa, synthetic construct
QVQLVQSGAEVKKPGSSVKVSCKASGYSFTTYYIHWVRQAPGQGLEWMGWFFPGSGNIKYNEKFKGRVTITADTSTSTAYMELSSLRSEDTAVYYCAGSYYMYDVLDYWGQGTTVTVSSASTKGPSVFPLAPSSKSTSGGTAALGCLVKDYFPEPVTVSWNSGALTSGVHTFPAVLQSSGLYSLSSVVTVPSSSLGTQTYICNVNHKPSNTKVDKKVEPKSC

SEQ ID NO: 981 - protein, 222 aa, synthetic construct
QVQLVQSGAEVKKPGSSVKVSCKASGYSFTTYYIHWVRQAPGQGLEWMGWFFPGSGNIKYNEKFKGRVTITADTSTSTAYMELSSLRSEDTAVYYCAGSYYNYDVLDYWGQGTTVTVSSASTKGPSVFPLAPSSKSTSGGTAALGCLVKDYFPEPVTVSWNSGALTSGVHTFPAVLQSSGLYSLSSVVTVPSSSLGTQTYICNVNHKPSNTKVDKKVEPKSC

SEQ ID NO: 982 - protein, 222 aa, synthetic construct
QVQLVQSGAEVKKPGSSVKVSCKASGYSFTTYYIHWVRQAPGQGLEWMGWFFPGSGNIKYNEKFKGRVTITADTSTSTAYMELSSLRSEDTAVYYCAGSYYQYDVLDYWGQGTTVTVSSASTKGPSVFPLAPSSKSTSGGTAALGCLVKDYFPEPVTVSWNSGALTSGVHTFPAVLQSSGLYSLSSVVTVPSSSLGTQTYICNVNHKPSNTKVDKKVEPKSC

SEQ ID NO: 983 - protein, 222 aa, synthetic construct
QVQLVQSGAEVKKPGSSVKVSCKASGYSFTTYYIHWVRQAPGQGLEWMGWFFPGSGNIKYNEKFKGRVTITADTSTSTAYMELSSLRSEDTAVYYCAGSYYRYDVLDYWGQGTTVTVSSASTKGPSVFPLAPSSKSTSGGTAALGCLVKDYFPEPVTVSWNSGALTSGVHTFPAVLQSSGLYSLSSVVTVPSSSLGTQTYICNVNHKPSNTKVDKKVEPKSC

SEQ ID NO: 984 - protein, 222 aa, synthetic construct
QVQLVQSGAEVKKPGSSVKVSCKASGYSFTTYYIHWVRQAPGQGLEWMGWFFPGSGNIKYNEKFKGRVTITADTSTSTAYMELSSLRSEDTAVYYCAGSYYTYDVLDYWGQGTTVTVSSASTKGPSVFPLAPSSKSTSGGTAALGCLVKDYFPEPVTVSWNSGALTSGVHTFPAVLQSSGLYSLSSVVTVPSSSLGTQTYICNVNHKPSNTKVDKKVEPKSC

SEQ ID NO: 985 - protein, 222 aa, synthetic construct
QVQLVQSGAEVKKPGSSVKVSCKASGYSFTTYYIHWVRQAPGQGLEWMGWFFPGSGNIKYNEKFKGRVTITADTSTSTAYMELSSLRSEDTAVYYCAGSYYVYDVLDYWGQGTTVTVSSASTKGPSVFPLAPSSKSTSGGTAALGCLVKDYFPEPVTVSWNSGALTSGVHTFPAVLQSSGLYSLSSVVTVPSSSLGTQTYICNVNHKPSNTKVDKKVEPKSC

SEQ ID NO: 986 - protein, 222 aa, synthetic construct
QVQLVQSGAEVKKPGSSVKVSCKASGYSFTTYYIHWVRQAPGQGLEWMGWFFPGSGNIKYNEKFKGRVTITADTSTSTAYMELSSLRSEDTAVYYCAGSYYWYDVLDYWGQGTTVTVSSASTKGPSVFPLAPSSKSTSGGTAALGCLVKDYFPEPVTVSWNSGALTSGVHTFPAVLQSSGLYSLSSVVTVPSSSLGTQTYICNVNHKPSNTKVDKKVEPKSC

SEQ ID NO: 987 - protein, 222 aa, synthetic construct
QVQLVQSGAEVKKPGSSVKVSCKASGYSFTTYYIHWVRQAPGQGLEWMGWFFPGSGNIKYNEKFKGRVTITADTSTSTAYMELSSLRSEDTAVYYCAGSYYYYDVLDYWGQGTTVTVSSASTKGPSVFPLAPSSKSTSGGTAALGCLVKDYFPEPVTVSWNSGALTSGVHTFPAVLQSSGLYSLSSVVTVPSSSLGTQTYICNVNHKPSNTKVDKKVEPKSC

SEQ ID NO: 988 - protein, 222 aa, synthetic construct
QVQLVQSGAEVKKPGSSVKVSCKASGYSFTTYYIHWVRQAPGQGLEWMGWFFPGSGNIKYNEKFKGRVTITADTSTSTAYMELSSLRSEDTAVYYCAGSYYSADVLDYWGQGTTVTVSSASTKGPSVFPLAPSSKSTSGGTAALGCLVKDYFPEPVTVSWNSGALTSGVHTFPAVLQSSGLYSLSSVVTVPSSSLGTQTYICNVNHKPSNTKVDKKVEPKSC

SEQ ID NO: 989 - protein, 222 aa, synthetic construct
QVQLVQSGAEVKKPGSSVKVSCKASGYSFTTYYIHWVRQAPGQGLEWMGWFFPGSGNIKYNEKFKGRVTITADTSTSTAYMELSSLRSEDTAVYYCAGSYYSDDVLDYWGQGTTVTVSSASTKGPSVFPLAPSSKSTSGGTAALGCLVKDYFPEPVTVSWNSGALTSGVHTFPAVLQSSGLYSLSSVVTVPSSSLGTQTYICNVNHKPSNTKVDKKVEPKSC

SEQ ID NO: 990 - protein, 222 aa, synthetic construct
QVQLVQSGAEVKKPGSSVKVSCKASGYSFTTYYIHWVRQAPGQGLEWMGWFFPGSGNIKYNEKFKGRVTITADTSTSTAYMELSSLRSEDTAVYYCAGSYYSEDVLDYWGQGTTVTVSSASTKGPSVFPLAPSSKSTSGGTAALGCLVKDYFPEPVTVSWNSGALTSGVHTFPAVLQSSGLYSLSSVVTVPSSSLGTQTYICNVNHKPSNTKVDKKVEPKSC

SEQ ID NO: 991 - protein, 222 aa, synthetic construct
QVQLVQSGAEVKKPGSSVKVSCKASGYSFTTYYIHWVRQAPGQGLEWMGWFFPGSGNIKYNEKFKGRVTITADTSTSTAYMELSSLRSEDTAVYYCAGSYYSFDVLDYWGQGTTVTVSSASTKGPSVFPLAPSSKSTSGGTAALGCLVKDYFPEPVTVSWNSGALTSGVHTFPAVLQSSGLYSLSSVVTVPSSSLGTQTYICNVNHKPSNTKVDKKVEPKSC

SEQ ID NO: 992 - protein, 222 aa, synthetic construct
QVQLVQSGAEVKKPGSSVKVSCKASGYSFTTYYIHWVRQAPGQGLEWMGWFFPGSGNIKYNEKFKGRVTITADTSTSTAYMELSSLRSEDTAVYYCAGSYYSHDVLDYWGQGTTVTVSSASTKGPSVFPLAPSSKSTSGGTAALGCLVKDYFPEPVTVSWNSGALTSGVHTFPAVLQSSGLYSLSSVVTVPSSSLGTQTYICNVNHKPSNTKVDKKVEPKSC

SEQ ID NO: 993 - protein, 222 aa, synthetic construct
QVQLVQSGAEVKKPGSSVKVSCKASGYSFTTYYIHWVRQAPGQGLEWMGWFFPGSGNIKYNEKFKGRVTITADTSTSTAYMELSSLRSEDTAVYYCAGSYYSIDVLDYWGQGTTVTVSSASTKGPSVFPLAPSSKSTSGGTAALGCLVKDYFPEPVTVSWNSGALTSGVHTFPAVLQSSGLYSLSSVVTVPSSSLGTQTYICNVNHKPSNTKVDKKVEPKSC

SEQ ID NO: 994 - protein, 222 aa, synthetic construct
QVQLVQSGAEVKKPGSSVKVSCKASGYSFTTYYIHWVRQAPGQGLEWMGWFFPGSGNIKYNEKFKGRVTITADTSTSTAYMELSSLRSEDTAVYYCAGSYYSKDVLDYWGQGTTVTVSSASTKGPSVFPLAPSSKSTSGGTAALGCLVKDYFPEPVTVSWNSGALTSGVHTFPAVLQSSGLYSLSSVVTVPSSSLGTQTYICNVNHKPSNTKVDKKVEPKSC

SEQ ID NO: 995 - protein, 222 aa, synthetic construct
QVQLVQSGAEVKKPGSSVKVSCKASGYSFTTYYIHWVRQAPGQGLEWMGWFFPGSGNIKYNEKFKGRVTITADTSTSTAYMELSSLRSEDTAVYYCAGSYYSLDVLDYWGQGTTVTVSSASTKGPSVFPLAPSSKSTSGGTAALGCLVKDYFPEPVTVSWNSGALTSGVHTFPAVLQSSGLYSLSSVVTVPSSSLGTQTYICNVNHKPSNTKVDKKVEPKSC

SEQ ID NO: 996 - protein, 222 aa, synthetic construct
QVQLVQSGAEVKKPGSSVKVSCKASGYSFTTYYIHWVRQAPGQGLEWMGWFFPGSGNIKYNEKFKGRVTITADTSTSTAYMELSSLRSEDTAVYYCAGSYYSMDVLDYWGQGTTVTVSSASTKGPSVFPLAPSSKSTSGGTAALGCLVKDYFPEPVTVSWNSGALTSGVHTFPAVLQSSGLYSLSSVVTVPSSSLGTQTYICNVNHKPSNTKVDKKVEPKSC

SEQ ID NO: 997 - protein, 222 aa, synthetic construct
QVQLVQSGAEVKKPGSSVKVSCKASGYSFTTYYIHWVRQAPGQGLEWMGWFFPGSGNIKYNEKFKGRVTITADTSTSTAYMELSSLRSEDTAVYYCAGSYYSNDVLDYWGQGTTVTVSSASTKGPSVFPLAPSSKSTSGGTAALGCLVKDYFPEPVTVSWNSGALTSGVHTFPAVLQSSGLYSLSSVVTVPSSSLGTQTYICNVNHKPSNTKVDKKVEPKSC

SEQ ID NO: 998 - protein, 222 aa, synthetic construct
QVQLVQSGAEVKKPGSSVKVSCKASGYSFTTYYIHWVRQAPGQGLEWMGWFFPGSGNIKYNEKFKGRVTITADTSTSTAYMELSSLRSEDTAVYYCAGSYYSPDVLDYWGQGTTVTVSSASTKGPSVFPLAPSSKSTSGGTAALGCLVKDYFPEPVTVSWNSGALTSGVHTFPAVLQSSGLYSLSSVVTVPSSSLGTQTYICNVNHKPSNTKVDKKVEPKSC

SEQ ID NO: 999 - protein, 222 aa, synthetic construct
QVQLVQSGAEVKKPGSSVKVSCKASGYSFTTYYIHWVRQAPGQGLEWMGWFFPGSGNIKYNEKFKGRVTITADTSTSTAYMELSSLRSEDTAVYYCAGSYYSQDVLDYWGQGTTVTVSSASTKGPSVFPLAPSSKSTSGGTAALGCLVKDYFPEPVTVSWNSGALTSGVHTFPAVLQSSGLYSLSSVVTVPSSSLGTQTYICNVNHKPSNTKVDKKVEPKSC

SEQ ID NO: 1000 - protein, 222 aa, synthetic construct
QVQLVQSGAEVKKPGSSVKVSCKASGYSFTTYYIHWVRQAPGQGLEWMGWFFPGSGNIKYNEKFKGRVTITADTSTSTAYMELSSLRSEDTAVYYCAGSYYSRDVLDYWGQGTTVTVSSASTKGPSVFPLAPSSKSTSGGTAALGCLVKDYFPEPVTVSWNSGALTSGVHTFPAVLQSSGLYSLSSVVTVPSSSLGTQTYICNVNHKPSNTKVDKKVEPKSC

SEQ ID NO: 1001 - protein, 222 aa, synthetic construct
QVQLVQSGAEVKKPGSSVKVSCKASGYSFTTYYIHWVRQAPGQGLEWMGWFFPGSGNIKYNEKFKGRVTITADTSTSTAYMELSSLRSEDTAVYYCAGSYYSSDVLDYWGQGTTVTVSSASTKGPSVFPLAPSSKSTSGGTAALGCLVKDYFPEPVTVSWNSGALTSGVHTFPAVLQSSGLYSLSSVVTVPSSSLGTQTYICNVNHKPSNTKVDKKVEPKSC

SEQ ID NO: 1002 - protein, 222 aa, synthetic construct
QVQLVQSGAEVKKPGSSVKVSCKASGYSFTTYYIHWVRQAPGQGLEWMGWFFPGSGNIKYNEKFKGRVTITADTSTSTAYMELSSLRSEDTAVYYCAGSYYSVDVLDYWGQGTTVTVSSASTKGPSVFPLAPSSKSTSGGTAALGCLVKDYFPEPVTVSWNSGALTSGVHTFPAVLQSSGLYSLSSVVTVPSSSLGTQTYICNVNHKPSNTKVDKKVEPKSC

SEQ ID NO: 1003 - protein, 222 aa, synthetic construct
QVQLVQSGAEVKKPGSSVKVSCKASGYSFTTYYIHWVRQAPGQGLEWMGWFFPGSGNIKYNEKFKGRVTITADTSTSTAYMELSSLRSEDTAVYYCAGSYYSWDVLDYWGQGTTVTVSSASTKGPSVFPLAPSSKSTSGGTAALGCLVKDYFPEPVTVSWNSGALTSGVHTFPAVLQSSGLYSLSSVVTVPSSSLGTQTYICNVNHKPSNTKVDKKVEPKSC

SEQ ID NO: 1004 - protein, 222 aa, synthetic construct
QVQLVQSGAEVKKPGSSVKVSCKASGYSFTTYYIHWVRQAPGQGLEWMGWFFPGSGNIKYNEKFKGRVTITADTSTSTAYMELSSLRSEDTAVYYCAGSYYSYEVLDYWGQGTTVTVSSASTKGPSVFPLAPSSKSTSGGTAALGCLVKDYFPEPVTVSWNSGALTSGVHTFPAVLQSSGLYSLSSVVTVPSSSLGTQTYICNVNHKPSNTKVDKKVEPKSC

SEQ ID NO: 1005 - protein, 222 aa, synthetic construct
QVQLVQSGAEVKKPGSSVKVSCKASGYSFTTYYIHWVRQAPGQGLEWMGWFFPGSGNIKYNEKFKGRVTITADTSTSTAYMELSSLRSEDTAVYYCAGSYYSYFVLDYWGQGTTVTVSSASTKGPSVFPLAPSSKSTSGGTAALGCLVKDYFPEPVTVSWNSGALTSGVHTFPAVLQSSGLYSLSSVVTVPSSSLGTQTYICNVNHKPSNTKVDKKVEPKSC

SEQ ID NO: 1006 - protein, 222 aa, synthetic construct
QVQLVQSGAEVKKPGSSVKVSCKASGYSFTTYYIHWVRQAPGQGLEWMGWFFPGSGNIKYNEKFKGRVTITADTSTSTAYMELSSLRSEDTAVYYCAGSYYSYGVLDYWGQGTTVTVSSASTKGPSVFPLAPSSKSTSGGTAALGCLVKDYFPEPVTVSWNSGALTSGVHTFPAVLQSSGLYSLSSVVTVPSSSLGTQTYICNVNHKPSNTKVDKKVEPKSC

SEQ ID NO: 1007 - protein, 222 aa, synthetic construct
QVQLVQSGAEVKKPGSSVKVSCKASGYSFTTYYIHWVRQAPGQGLEWMGWFFPGSGNIKYNEKFKGRVTITADTSTSTAYMELSSLRSEDTAVYYCAGSYYSYHVLDYWGQGTTVTVSSASTKGPSVFPLAPSSKSTSGGTAALGCLVKDYFPEPVTVSWNSGALTSGVHTFPAVLQSSGLYSLSSVVTVPSSSLGTQTYICNVNHKPSNTKVDKKVEPKSC

SEQ ID NO: 1008 - protein, 222 aa, synthetic construct
QVQLVQSGAEVKKPGSSVKVSCKASGYSFTTYYIHWVRQAPGQGLEWMGWFFPGSGNIKYNEKFKGRVTITADTSTSTAYMELSSLRSEDTAVYYCAGSYYSYKVLDYWGQGTTVTVSSASTKGPSVFPLAPSSKSTSGGTAALGCLVKDYFPEPVTVSWNSGALTSGVHTFPAVLQSSGLYSLSSVVTVPSSSLGTQTYICNVNHKPSNTKVDKKVEPKSC

SEQ ID NO: 1009 - protein, 222 aa, synthetic construct
QVQLVQSGAEVKKPGSSVKVSCKASGYSFTTYYIHWVRQAPGQGLEWMGWFFPGSGNIKYNEKFKGRVTITADTSTSTAYMELSSLRSEDTAVYYCAGSYYSYLVLDYWGQGTTVTVSSASTKGPSVFPLAPSSKSTSGGTAALGCLVKDYFPEPVTVSWNSGALTSGVHTFPAVLQSSGLYSLSSVVTVPSSSLGTQTYICNVNHKPSNTKVDKKVEPKSC

SEQ ID NO: 1010 - protein, 222 aa, synthetic construct
QVQLVQSGAEVKKPGSSVKVSCKASGYSFTTYYIHWVRQAPGQGLEWMGWFFPGSGNIKYNEKFKGRVTITADTSTSTAYMELSSLRSEDTAVYYCAGSYYSYNVLDYWGQGTTVTVSSASTKGPSVFPLAPSSKSTSGGTAALGCLVKDYFPEPVTVSWNSGALTSGVHTFPAVLQSSGLYSLSSVVTVPSSSLGTQTYICNVNHKPSNTKVDKKVEPKSC

SEQ ID NO: 1011 - protein, 222 aa, synthetic construct
QVQLVQSGAEVKKPGSSVKVSCKASGYSFTTYYIHWVRQAPGQGLEWMGWFFPGSGNIKYNEKFKGRVTITADTSTSTAYMELSSLRSEDTAVYYCAGSYYSYPVLDYWGQGTTVTVSSASTKGPSVFPLAPSSKSTSGGTAALGCLVKDYFPEPVTVSWNSGALTSGVHTFPAVLQSSGLYSLSSVVTVPSSSLGTQTYICNVNHKPSNTKVDKKVEPKSC

SEQ ID NO: 1012 - protein, 222 aa, synthetic construct
QVQLVQSGAEVKKPGSSVKVSCKASGYSFTTYYIHWVRQAPGQGLEWMGWFFPGSGNIKYNEKFKGRVTITADTSTSTAYMELSSLRSEDTAVYYCAGSYYSYQVLDYWGQGTTVTVSSASTKGPSVFPLAPSSKSTSGGTAALGCLVKDYFPEPVTVSWNSGALTSGVHTFPAVLQSSGLYSLSSVVTVPSSSLGTQTYICNVNHKPSNTKVDKKVEPKSC

SEQ ID NO: 1013 - protein, 222 aa, synthetic construct
QVQLVQSGAEVKKPGSSVKVSCKASGYSFTTYYIHWVRQAPGQGLEWMGWFFPGSGNIKYNEKFKGRVTITADTSTSTAYMELSSLRSEDTAVYYCAGSYYSYRVLDYWGQGTTVTVSSASTKGPSVFPLAPSSKSTSGGTAALGCLVKDYFPEPVTVSWNSGALTSGVHTFPAVLQSSGLYSLSSVVTVPSSSLGTQTYICNVNHKPSNTKVDKKVEPKSC

SEQ ID NO: 1014 - protein, 222 aa, synthetic construct
QVQLVQSGAEVKKPGSSVKVSCKASGYSFTTYYIHWVRQAPGQGLEWMGWFFPGSGNIKYNEKFKGRVTITADTSTSTAYMELSSLRSEDTAVYYCAGSYYSYSVLDYWGQGTTVTVSSASTKGPSVFPLAPSSKSTSGGTAALGCLVKDYFPEPVTVSWNSGALTSGVHTFPAVLQSSGLYSLSSVVTVPSSSLGTQTYICNVNHKPSNTKVDKKVEPKSC

SEQ ID NO: 1015 - protein, 222 aa, synthetic construct
QVQLVQSGAEVKKPGSSVKVSCKASGYSFTTYYIHWVRQAPGQGLEWMGWFFPGSGNIKYNEKFKGRVTITADTSTSTAYMELSSLRSEDTAVYYCAGSYYSYTVLDYWGQGTTVTVSSASTKGPSVFPLAPSSKSTSGGTAALGCLVKDYFPEPVTVSWNSGALTSGVHTFPAVLQSSGLYSLSSVVTVPSSSLGTQTYICNVNHKPSNTKVDKKVEPKSC

SEQ ID NO: 1016 - protein, 222 aa, synthetic construct
QVQLVQSGAEVKKPGSSVKVSCKASGYSFTTYYIHWVRQAPGQGLEWMGWFFPGSGNIKYNEKFKGRVTITADTSTSTAYMELSSLRSEDTAVYYCAGSYYSYVVLDYWGQGTTVTVSSASTKGPSVFPLAPSSKSTSGGTAALGCLVKDYFPEPVTVSWNSGALTSGVHTFPAVLQSSGLYSLSSVVTVPSSSLGTQTYICNVNHKPSNTKVDKKVEPKSC

SEQ ID NO: 1017 - protein, 222 aa, synthetic construct
QVQLVQSGAEVKKPGSSVKVSCKASGYSFTTYYIHWVRQAPGQGLEWMGWFFPGSGNIKYNEKFKGRVTITADTSTSTAYMELSSLRSEDTAVYYCAGSYYSYWVLDYWGQGTTVTVSSASTKGPSVFPLAPSSKSTSGGTAALGCLVKDYFPEPVTVSWNSGALTSGVHTFPAVLQSSGLYSLSSVVTVPSSSLGTQTYICNVNHKPSNTKVDKKVEPKSC

SEQ ID NO: 1018 - protein, 222 aa, synthetic construct
QVQLVQSGAEVKKPGSSVKVSCKASGYSFTTYYIHWVRQAPGQGLEWMGWFFPGSGNIKYNEKFKGRVTITADTSTSTAYMELSSLRSEDTAVYYCAGSYYSYDALDYWGQGTTVTVSSASTKGPSVFPLAPSSKSTSGGTAALGCLVKDYFPEPVTVSWNSGALTSGVHTFPAVLQSSGLYSLSSVVTVPSSSLGTQTYICNVNHKPSNTKVDKKVEPKSC

SEQ ID NO: 1019 - protein, 222 aa, synthetic construct
QVQLVQSGAEVKKPGSSVKVSCKASGYSFTTYYIHWVRQAPGQGLEWMGWFFPGSGNIKYNEKFKGRVTITADTSTSTAYMELSSLRSEDTAVYYCAGSYYSYDDLDYWGQGTTVTVSSASTKGPSVFPLAPSSKSTSGGTAALGCLVKDYFPEPVTVSWNSGALTSGVHTFPAVLQSSGLYSLSSVVTVPSSSLGTQTYICNVNHKPSNTKVDKKVEPKSC

SEQ ID NO: 1020 - protein, 222 aa, synthetic construct
QVQLVQSGAEVKKPGSSVKVSCKASGYSFTTYYIHWVRQAPGQGLEWMGWFFPGSGNIKYNEKFKGRVTITADTSTSTAYMELSSLRSEDTAVYYCAGSYYSYDELDYWGQGTTVTVSSASTKGPSVFPLAPSSKSTSGGTAALGCLVKDYFPEPVTVSWNSGALTSGVHTFPAVLQSSGLYSLSSVVTVPSSSLGTQTYICNVNHKPSNTKVDKKVEPKSC

SEQ ID NO: 1021 - protein, 222 aa, synthetic construct
QVQLVQSGAEVKKPGSSVKVSCKASGYSFTTYYIHWVRQAPGQGLEWMGWFFPGSGNIKYNEKFKGRVTITADTSTSTAYMELSSLRSEDTAVYYCAGSYYSYDFLDYWGQGTTVTVSSASTKGPSVFPLAPSSKSTSGGTAALGCLVKDYFPEPVTVSWNSGALTSGVHTFPAVLQSSGLYSLSSVVTVPSSSLGTQTYICNVNHKPSNTKVDKKVEPKSC

SEQ ID NO: 1022 - protein, 222 aa, synthetic construct
QVQLVQSGAEVKKPGSSVKVSCKASGYSFTTYYIHWVRQAPGQGLEWMGWFFPGSGNIKYNEKFKGRVTITADTSTSTAYMELSSLRSEDTAVYYCAGSYYSYDGLDYWGQGTTVTVSSASTKGPSVFPLAPSSKSTSGGTAALGCLVKDYFPEPVTVSWNSGALTSGVHTFPAVLQSSGLYSLSSVVTVPSSSLGTQTYICNVNHKPSNTKVDKKVEPKSC

SEQ ID NO: 1023 - protein, 222 aa, synthetic construct
QVQLVQSGAEVKKPGSSVKVSCKASGYSFTTYYIHWVRQAPGQGLEWMGWFFPGSGNIKYNEKFKGRVTITADTSTSTAYMELSSLRSEDTAVYYCAGSYYSYDHLDYWGQGTTVTVSSASTKGPSVFPLAPSSKSTSGGTAALGCLVKDYFPEPVTVSWNSGALTSGVHTFPAVLQSSGLYSLSSVVTVPSSSLGTQTYICNVNHKPSNTKVDKKVEPKSC

SEQ ID NO: 1024 - protein, 222 aa, synthetic construct
QVQLVQSGAEVKKPGSSVKVSCKASGYSFTTYYIHWVRQAPGQGLEWMGWFFPGSGNIKYNEKFKGRVTITADTSTSTAYMELSSLRSEDTAVYYCAGSYYSYDKLDYWGQGTTVTVSSASTKGPSVFPLAPSSKSTSGGTAALGCLVKDYFPEPVTVSWNSGALTSGVHTFPAVLQSSGLYSLSSVVTVPSSSLGTQTYICNVNHKPSNTKVDKKVEPKSC

SEQ ID NO: 1025 - protein, 222 aa, synthetic construct
QVQLVQSGAEVKKPGSSVKVSCKASGYSFTTYYIHWVRQAPGQGLEWMGWFFPGSGNIKYNEKFKGRVTITADTSTSTAYMELSSLRSEDTAVYYCAGSYYSYDLLDYWGQGTTVTVSSASTKGPSVFPLAPSSKSTSGGTAALGCLVKDYFPEPVTVSWNSGALTSGVHTFPAVLQSSGLYSLSSVVTVPSSSLGTQTYICNVNHKPSNTKVDKKVEPKSC

SEQ ID NO: 1026 - protein, 222 aa, synthetic construct
QVQLVQSGAEVKKPGSSVKVSCKASGYSFTTYYIHWVRQAPGQGLEWMGWFFPGSGNIKYNEKFKGRVTITADTSTSTAYMELSSLRSEDTAVYYCAGSYYSYDMLDYWGQGTTVTVSSASTKGPSVFPLAPSSKSTSGGTAALGCLVKDYFPEPVTVSWNSGALTSGVHTFPAVLQSSGLYSLSSVVTVPSSSLGTQTYICNVNHKPSNTKVDKKVEPKSC

SEQ ID NO: 1027 - protein, 222 aa, synthetic construct
QVQLVQSGAEVKKPGSSVKVSCKASGYSFTTYYIHWVRQAPGQGLEWMGWFFPGSGNIKYNEKFKGRVTITADTSTSTAYMELSSLRSEDTAVYYCAGSYYSYDNLDYWGQGTTVTVSSASTKGPSVFPLAPSSKSTSGGTAALGCLVKDYFPEPVTVSWNSGALTSGVHTFPAVLQSSGLYSLSSVVTVPSSSLGTQTYICNVNHKPSNTKVDKKVEPKSC

SEQ ID NO: 1028 - protein, 222 aa, synthetic construct
QVQLVQSGAEVKKPGSSVKVSCKASGYSFTTYYIHWVRQAPGQGLEWMGWFFPGSGNIKYNEKFKGRVTITADTSTSTAYMELSSLRSEDTAVYYCAGSYYSYDPLDYWGQGTTVTVSSASTKGPSVFPLAPSSKSTSGGTAALGCLVKDYFPEPVTVSWNSGALTSGVHTFPAVLQSSGLYSLSSVVTVPSSSLGTQTYICNVNHKPSNTKVDKKVEPKSC

SEQ ID NO: 1029 - protein, 222 aa, synthetic construct
QVQLVQSGAEVKKPGSSVKVSCKASGYSFTTYYIHWVRQAPGQGLEWMGWFFPGSGNIKYNEKFKGRVTITADTSTSTAYMELSSLRSEDTAVYYCAGSYYSYDQLDYWGQGTTVTVSSASTKGPSVFPLAPSSKSTSGGTAALGCLVKDYFPEPVTVSWNSGALTSGVHTFPAVLQSSGLYSLSSVVTVPSSSLGTQTYICNVNHKPSNTKVDKKVEPKSC

SEQ ID NO: 1030 - protein, 222 aa, synthetic construct
QVQLVQSGAEVKKPGSSVKVSCKASGYSFTTYYIHWVRQAPGQGLEWMGWFFPGSGNIKYNEKFKGRVTITADTSTSTAYMELSSLRSEDTAVYYCAGSYYSYDRLDYWGQGTTVTVSSASTKGPSVFPLAPSSKSTSGGTAALGCLVKDYFPEPVTVSWNSGALTSGVHTFPAVLQSSGLYSLSSVVTVPSSSLGTQTYICNVNHKPSNTKVDKKVEPKSC

SEQ ID NO: 1031 - protein, 222 aa, synthetic construct
QVQLVQSGAEVKKPGSSVKVSCKASGYSFTTYYIHWVRQAPGQGLEWMGWFFPGSGNIKYNEKFKGRVTITADTSTSTAYMELSSLRSEDTAVYYCAGSYYSYDSLDYWGQGTTVTVSSASTKGPSVFPLAPSSKSTSGGTAALGCLVKDYFPEPVTVSWNSGALTSGVHTFPAVLQSSGLYSLSSVVTVPSSSLGTQTYICNVNHKPSNTKVDKKVEPKSC

SEQ ID NO: 1032 - protein, 222 aa, synthetic construct
QVQLVQSGAEVKKPGSSVKVSCKASGYSFTTYYIHWVRQAPGQGLEWMGWFFPGSGNIKYNEKFKGRVTITADTSTSTAYMELSSLRSEDTAVYYCAGSYYSYDTLDYWGQGTTVTVSSASTKGPSVFPLAPSSKSTSGGTAALGCLVKDYFPEPVTVSWNSGALTSGVHTFPAVLQSSGLYSLSSVVTVPSSSLGTQTYICNVNHKPSNTKVDKKVEPKSC

SEQ ID NO: 1033 - protein, 222 aa, synthetic construct
QVQLVQSGAEVKKPGSSVKVSCKASGYSFTTYYIHWVRQAPGQGLEWMGWFFPGSGNIKYNEKFKGRVTITADTSTSTAYMELSSLRSEDTAVYYCAGSYYSYDWLDYWGQGTTVTVSSASTKGPSVFPLAPSSKSTSGGTAALGCLVKDYFPEPVTVSWNSGALTSGVHTFPAVLQSSGLYSLSSVVTVPSSSLGTQTYICNVNHKPSNTKVDKKVEPKSC

SEQ ID NO: 1034 - protein, 222 aa, synthetic construct
QVQLVQSGAEVKKPGSSVKVSCKASGYSFTTYYIHWVRQAPGQGLEWMGWFFPGSGNIKYNEKFKGRVTITADTSTSTAYMELSSLRSEDTAVYYCAGSYYSYDYLDYWGQGTTVTVSSASTKGPSVFPLAPSSKSTSGGTAALGCLVKDYFPEPVTVSWNSGALTSGVHTFPAVLQSSGLYSLSSVVTVPSSSLGTQTYICNVNHKPSNTKVDKKVEPKSC

SEQ ID NO: 1035 - protein, 222 aa, synthetic construct
QVQLVQSGAEVKKPGSSVKVSCKASGYSFTTYYIHWVRQAPGQGLEWMGWFFPGSGNIKYNEKFKGRVTITADTSTSTAYMELSSLRSEDTAVYYCAGSYYSYDVADYWGQGTTVTVSSASTKGPSVFPLAPSSKSTSGGTAALGCLVKDYFPEPVTVSWNSGALTSGVHTFPAVLQSSGLYSLSSVVTVPSSSLGTQTYICNVNHKPSNTKVDKKVEPKSC

SEQ ID NO: 1036 - protein, 222 aa, synthetic construct
QVQLVQSGAEVKKPGSSVKVSCKASGYSFTTYYIHWVRQAPGQGLEWMGWFFPGSGNIKYNEKFKGRVTITADTSTSTAYMELSSLRSEDTAVYYCAGSYYSYDVDDYWGQGTTVTVSSASTKGPSVFPLAPSSKSTSGGTAALGCLVKDYFPEPVTVSWNSGALTSGVHTFPAVLQSSGLYSLSSVVTVPSSSLGTQTYICNVNHKPSNTKVDKKVEPKSC

SEQ ID NO: 1037 - protein, 222 aa, synthetic construct
QVQLVQSGAEVKKPGSSVKVSCKASGYSFTTYYIHWVRQAPGQGLEWMGWFFPGSGNIKYNEKFKGRVTITADTSTSTAYMELSSLRSEDTAVYYCAGSYYSYDVEDYWGQGTTVTVSSASTKGPSVFPLAPSSKSTSGGTAALGCLVKDYFPEPVTVSWNSGALTSGVHTFPAVLQSSGLYSLSSVVTVPSSSLGTQTYICNVNHKPSNTKVDKKVEPKSC

SEQ ID NO: 1038 - protein, 222 aa, synthetic construct
QVQLVQSGAEVKKPGSSVKVSCKASGYSFTTYYIHWVRQAPGQGLEWMGWFFPGSGNIKYNEKFKGRVTITADTSTSTAYMELSSLRSEDTAVYYCAGSYYSYDVGDYWGQGTTVTVSSASTKGPSVFPLAPSSKSTSGGTAALGCLVKDYFPEPVTVSWNSGALTSGVHTFPAVLQSSGLYSLSSVVTVPSSSLGTQTYICNVNHKPSNTKVDKKVEPKSC

SEQ ID NO: 1039 - protein, 222 aa, synthetic construct
QVQLVQSGAEVKKPGSSVKVSCKASGYSFTTYYIHWVRQAPGQGLEWMGWFFPGSGNIKYNEKFKGRVTITADTSTSTAYMELSSLRSEDTAVYYCAGSYYSYDVHDYWGQGTTVTVSSASTKGPSVFPLAPSSKSTSGGTAALGCLVKDYFPEPVTVSWNSGALTSGVHTFPAVLQSSGLYSLSSVVTVPSSSLGTQTYICNVNHKPSNTKVDKKVEPKSC

SEQ ID NO: 1040 - protein, 222 aa, synthetic construct
QVQLVQSGAEVKKPGSSVKVSCKASGYSFTTYYIHWVRQAPGQGLEWMGWFFPGSGNIKYNEKFKGRVTITADTSTSTAYMELSSLRSEDTAVYYCAGSYYSYDVIDYWGQGTTVTVSSASTKGPSVFPLAPSSKSTSGGTAALGCLVKDYFPEPVTVSWNSGALTSGVHTFPAVLQSSGLYSLSSVVTVPSSSLGTQTYICNVNHKPSNTKVDKKVEPKSC

SEQ ID NO: 1041 - protein, 222 aa, synthetic construct
QVQLVQSGAEVKKPGSSVKVSCKASGYSFTTYYIHWVRQAPGQGLEWMGWFFPGSGNIKYNEKFKGRVTITADTSTSTAYMELSSLRSEDTAVYYCAGSYYSYDVKDYWGQGTTVTVSSASTKGPSVFPLAPSSKSTSGGTAALGCLVKDYFPEPVTVSWNSGALTSGVHTFPAVLQSSGLYSLSSVVTVPSSSLGTQTYICNVNHKPSNTKVDKKVEPKSC

SEQ ID NO: 1042 - protein, 222 aa, synthetic construct
QVQLVQSGAEVKKPGSSVKVSCKASGYSFTTYYIHWVRQAPGQGLEWMGWFFPGSGNIKYNEKFKGRVTITADTSTSTAYMELSSLRSEDTAVYYCAGSYYSYDVMDYWGQGTTVTVSSASTKGPSVFPLAPSSKSTSGGTAALGCLVKDYFPEPVTVSWNSGALTSGVHTFPAVLQSSGLYSLSSVVTVPSSSLGTQTYICNVNHKPSNTKVDKKVEPKSC

SEQ ID NO: 1043 - protein, 222 aa, synthetic construct
QVQLVQSGAEVKKPGSSVKVSCKASGYSFTTYYIHWVRQAPGQGLEWMGWFFPGSGNIKYNEKFKGRVTITADTSTSTAYMELSSLRSEDTAVYYCAGSYYSYDVNDYWGQGTTVTVSSASTKGPSVFPLAPSSKSTSGGTAALGCLVKDYFPEPVTVSWNSGALTSGVHTFPAVLQSSGLYSLSSVVTVPSSSLGTQTYICNVNHKPSNTKVDKKVEPKSC

SEQ ID NO: 1044 - protein, 222 aa, synthetic construct
QVQLVQSGAEVKKPGSSVKVSCKASGYSFTTYYIHWVRQAPGQGLEWMGWFFPGSGNIKYNEKFKGRVTITADTSTSTAYMELSSLRSEDTAVYYCAGSYYSYDVPDYWGQGTTVTVSSASTKGPSVFPLAPSSKSTSGGTAALGCLVKDYFPEPVTVSWNSGALTSGVHTFPAVLQSSGLYSLSSVVTVPSSSLGTQTYICNVNHKPSNTKVDKKVEPKSC

SEQ ID NO: 1045 - protein, 222 aa, synthetic construct
QVQLVQSGAEVKKPGSSVKVSCKASGYSFTTYYIHWVRQAPGQGLEWMGWFFPGSGNIKYNEKFKGRVTITADTSTSTAYMELSSLRSEDTAVYYCAGSYYSYDVQDYWGQGTTVTVSSASTKGPSVFPLAPSSKSTSGGTAALGCLVKDYFPEPVTVSWNSGALTSGVHTFPAVLQSSGLYSLSSVVTVPSSSLGTQTYICNVNHKPSNTKVDKKVEPKSC

SEQ ID NO: 1046 - protein, 222 aa, synthetic construct
QVQLVQSGAEVKKPGSSVKVSCKASGYSFTTYYIHWVRQAPGQGLEWMGWFFPGSGNIKYNEKFKGRVTITADTSTSTAYMELSSLRSEDTAVYYCAGSYYSYDVRDYWGQGTTVTVSSASTKGPSVFPLAPSSKSTSGGTAALGCLVKDYFPEPVTVSWNSGALTSGVHTFPAVLQSSGLYSLSSVVTVPSSSLGTQTYICNVNHKPSNTKVDKKVEPKSC

SEQ ID NO: 1047 - protein, 222 aa, synthetic construct
QVQLVQSGAEVKKPGSSVKVSCKASGYSFTTYYIHWVRQAPGQGLEWMGWFFPGSGNIKYNEKFKGRVTITADTSTSTAYMELSSLRSEDTAVYYCAGSYYSYDVSDYWGQGTTVTVSSASTKGPSVFPLAPSSKSTSGGTAALGCLVKDYFPEPVTVSWNSGALTSGVHTFPAVLQSSGLYSLSSVVTVPSSSLGTQTYICNVNHKPSNTKVDKKVEPKSC

SEQ ID NO: 1048 - protein, 222 aa, synthetic construct
QVQLVQSGAEVKKPGSSVKVSCKASGYSFTTYYIHWVRQAPGQGLEWMGWFFPGSGNIKYNEKFKGRVTITADTSTSTAYMELSSLRSEDTAVYYCAGSYYSYDVTDYWGQGTTVTVSSASTKGPSVFPLAPSSKSTSGGTAALGCLVKDYFPEPVTVSWNSGALTSGVHTFPAVLQSSGLYSLSSVVTVPSSSLGTQTYICNVNHKPSNTKVDKKVEPKSC

SEQ ID NO: 1049 - protein, 222 aa, synthetic construct
QVQLVQSGAEVKKPGSSVKVSCKASGYSFTTYYIHWVRQAPGQGLEWMGWFFPGSGNIKYNEKFKGRVTITADTSTSTAYMELSSLRSEDTAVYYCAGSYYSYDVVDYWGQGTTVTVSSASTKGPSVFPLAPSSKSTSGGTAALGCLVKDYFPEPVTVSWNSGALTSGVHTFPAVLQSSGLYSLSSVVTVPSSSLGTQTYICNVNHKPSNTKVDKKVEPKSC

SEQ ID NO: 1050 - protein, 222 aa, synthetic construct
QVQLVQSGAEVKKPGSSVKVSCKASGYSFTTYYIHWVRQAPGQGLEWMGWFFPGSGNIKYNEKFKGRVTITADTSTSTAYMELSSLRSEDTAVYYCAGSYYSYDVYDYWGQGTTVTVSSASTKGPSVFPLAPSSKSTSGGTAALGCLVKDYFPEPVTVSWNSGALTSGVHTFPAVLQSSGLYSLSSVVTVPSSSLGTQTYICNVNHKPSNTKVDKKVEPKSC

SEQ ID NO: 1051 - protein, 222 aa, synthetic construct
QVQLVQSGAEVKKPGSSVKVSCKASGYSFTTYYIHWVRQAPGQGLEWMGWFFPGSGNIKYNEKFKGRVTITADTSTSTAYMELSSLRSEDTAVYYCAGSYYSYDVLAYWGQGTTVTVSSASTKGPSVFPLAPSSKSTSGGTAALGCLVKDYFPEPVTVSWNSGALTSGVHTFPAVLQSSGLYSLSSVVTVPSSSLGTQTYICNVNHKPSNTKVDKKVEPKSC

SEQ ID NO: 1052 - protein, 222 aa, synthetic construct
QVQLVQSGAEVKKPGSSVKVSCKASGYSFTTYYIHWVRQAPGQGLEWMGWFFPGSGNIKYNEKFKGRVTITADTSTSTAYMELSSLRSEDTAVYYCAGSYYSYDVLEYWGQGTTVTVSSASTKGPSVFPLAPSSKSTSGGTAALGCLVKDYFPEPVTVSWNSGALTSGVHTFPAVLQSSGLYSLSSVVTVPSSSLGTQTYICNVNHKPSNTKVDKKVEPKSC

SEQ ID NO: 1053 - protein, 222 aa, synthetic construct
QVQLVQSGAEVKKPGSSVKVSCKASGYSFTTYYIHWVRQAPGQGLEWMGWFFPGSGNIKYNEKFKGRVTITADTSTSTAYMELSSLRSEDTAVYYCAGSYYSYDVLFYWGQGTTVTVSSASTKGPSVFPLAPSSKSTSGGTAALGCLVKDYFPEPVTVSWNSGALTSGVHTFPAVLQSSGLYSLSSVVTVPSSSLGTQTYICNVNHKPSNTKVDKKVEPKSC

SEQ ID NO: 1054 - protein, 222 aa, synthetic construct
QVQLVQSGAEVKKPGSSVKVSCKASGYSFTTYYIHWVRQAPGQGLEWMGWFFPGSGNIKYNEKFKGRVTITADTSTSTAYMELSSLRSEDTAVYYCAGSYYSYDVLGYWGQGTTVTVSSASTKGPSVFPLAPSSKSTSGGTAALGCLVKDYFPEPVTVSWNSGALTSGVHTFPAVLQSSGLYSLSSVVTVPSSSLGTQTYICNVNHKPSNTKVDKKVEPKSC

SEQ ID NO: 1055 - protein, 222 aa, synthetic construct
QVQLVQSGAEVKKPGSSVKVSCKASGYSFTTYYIHWVRQAPGQGLEWMGWFFPGSGNIKYNEKFKGRVTITADTSTSTAYMELSSLRSEDTAVYYCAGSYYSYDVLHYWGQGTTVTVSSASTKGPSVFPLAPSSKSTSGGTAALGCLVKDYFPEPVTVSWNSGALTSGVHTFPAVLQSSGLYSLSSVVTVPSSSLGTQTYICNVNHKPSNTKVDKKVEPKSC

SEQ ID NO: 1056 - protein, 222 aa, synthetic construct
QVQLVQSGAEVKKPGSSVKVSCKASGYSFTTYYIHWVRQAPGQGLEWMGWFFPGSGNIKYNEKFKGRVTITADTSTSTAYMELSSLRSEDTAVYYCAGSYYSYDVLIYWGQGTTVTVSSASTKGPSVFPLAPSSKSTSGGTAALGCLVKDYFPEPVTVSWNSGALTSGVHTFPAVLQSSGLYSLSSVVTVPSSSLGTQTYICNVNHKPSNTKVDKKVEPKSC

SEQ ID NO: 1057 - protein, 222 aa, synthetic construct
QVQLVQSGAEVKKPGSSVKVSCKASGYSFTTYYIHWVRQAPGQGLEWMGWFFPGSGNIKYNEKFKGRVTITADTSTSTAYMELSSLRSEDTAVYYCAGSYYSYDVLKYWGQGTTVTVSSASTKGPSVFPLAPSSKSTSGGTAALGCLVKDYFPEPVTVSWNSGALTSGVHTFPAVLQSSGLYSLSSVVTVPSSSLGTQTYICNVNHKPSNTKVDKKVEPKSC

SEQ ID NO: 1058 - protein, 222 aa, synthetic construct
QVQLVQSGAEVKKPGSSVKVSCKASGYSFTTYYIHWVRQAPGQGLEWMGWFFPGSGNIKYNEKFKGRVTITADTSTSTAYMELSSLRSEDTAVYYCAGSYYSYDVLLYWGQGTTVTVSSASTKGPSVFPLAPSSKSTSGGTAALGCLVKDYFPEPVTVSWNSGALTSGVHTFPAVLQSSGLYSLSSVVTVPSSSLGTQTYICNVNHKPSNTKVDKKVEPKSC

SEQ ID NO: 1059 - protein, 222 aa, synthetic construct
QVQLVQSGAEVKKPGSSVKVSCKASGYSFTTYYIHWVRQAPGQGLEWMGWFFPGSGNIKYNEKFKGRVTITADTSTSTAYMELSSLRSEDTAVYYCAGSYYSYDVLMYWGQGTTVTVSSASTKGPSVFPLAPSSKSTSGGTAALGCLVKDYFPEPVTVSWNSGALTSGVHTFPAVLQSSGLYSLSSVVTVPSSSLGTQTYICNVNHKPSNTKVDKKVEPKSC

SEQ ID NO: 1060 - protein, 222 aa, synthetic construct
QVQLVQSGAEVKKPGSSVKVSCKASGYSFTTYYIHWVRQAPGQGLEWMGWFFPGSGNIKYNEKFKGRVTITADTSTSTAYMELSSLRSEDTAVYYCAGSYYSYDVLNYWGQGTTVTVSSASTKGPSVFPLAPSSKSTSGGTAALGCLVKDYFPEPVTVSWNSGALTSGVHTFPAVLQSSGLYSLSSVVTVPSSSLGTQTYICNVNHKPSNTKVDKKVEPKSC

SEQ ID NO: 1061 - protein, 222 aa, synthetic construct
QVQLVQSGAEVKKPGSSVKVSCKASGYSFTTYYIHWVRQAPGQGLEWMGWFFPGSGNIKYNEKFKGRVTITADTSTSTAYMELSSLRSEDTAVYYCAGSYYSYDVLPYWGQGTTVTVSSASTKGPSVFPLAPSSKSTSGGTAALGCLVKDYFPEPVTVSWNSGALTSGVHTFPAVLQSSGLYSLSSVVTVPSSSLGTQTYICNVNHKPSNTKVDKKVEPKSC

SEQ ID NO: 1062 - protein, 222 aa, synthetic construct
QVQLVQSGAEVKKPGSSVKVSCKASGYSFTTYYIHWVRQAPGQGLEWMGWFFPGSGNIKYNEKFKGRVTITADTSTSTAYMELSSLRSEDTAVYYCAGSYYSYDVLQYWGQGTTVTVSSASTKGPSVFPLAPSSKSTSGGTAALGCLVKDYFPEPVTVSWNSGALTSGVHTFPAVLQSSGLYSLSSVVTVPSSSLGTQTYICNVNHKPSNTKVDKKVEPKSC

SEQ ID NO: 1063 - protein, 222 aa, synthetic construct
QVQLVQSGAEVKKPGSSVKVSCKASGYSFTTYYIHWVRQAPGQGLEWMGWFFPGSGNIKYNEKFKGRVTITADTSTSTAYMELSSLRSEDTAVYYCAGSYYSYDVLRYWGQGTTVTVSSASTKGPSVFPLAPSSKSTSGGTAALGCLVKDYFPEPVTVSWNSGALTSGVHTFPAVLQSSGLYSLSSVVTVPSSSLGTQTYICNVNHKPSNTKVDKKVEPKSC

SEQ ID NO: 1064 - protein, 222 aa, synthetic construct
QVQLVQSGAEVKKPGSSVKVSCKASGYSFTTYYIHWVRQAPGQGLEWMGWFFPGSGNIKYNEKFKGRVTITADTSTSTAYMELSSLRSEDTAVYYCAGSYYSYDVLSYWGQGTTVTVSSASTKGPSVFPLAPSSKSTSGGTAALGCLVKDYFPEPVTVSWNSGALTSGVHTFPAVLQSSGLYSLSSVVTVPSSSLGTQTYICNVNHKPSNTKVDKKVEPKSC

SEQ ID NO: 1065 - protein, 222 aa, synthetic construct
QVQLVQSGAEVKKPGSSVKVSCKASGYSFTTYYIHWVRQAPGQGLEWMGWFFPGSGNIKYNEKFKGRVTITADTSTSTAYMELSSLRSEDTAVYYCAGSYYSYDVLTYWGQGTTVTVSSASTKGPSVFPLAPSSKSTSGGTAALGCLVKDYFPEPVTVSWNSGALTSGVHTFPAVLQSSGLYSLSSVVTVPSSSLGTQTYICNVNHKPSNTKVDKKVEPKSC

SEQ ID NO: 1066 - protein, 222 aa, synthetic construct
QVQLVQSGAEVKKPGSSVKVSCKASGYSFTTYYIHWVRQAPGQGLEWMGWFFPGSGNIKYNEKFKGRVTITADTSTSTAYMELSSLRSEDTAVYYCAGSYYSYDVLVYWGQGTTVTVSSASTKGPSVFPLAPSSKSTSGGTAALGCLVKDYFPEPVTVSWNSGALTSGVHTFPAVLQSSGLYSLSSVVTVPSSSLGTQTYICNVNHKPSNTKVDKKVEPKSC

SEQ ID NO: 1067 - protein, 222 aa, synthetic construct
QVQLVQSGAEVKKPGSSVKVSCKASGYSFTTYYIHWVRQAPGQGLEWMGWFFPGSGNIKYNEKFKGRVTITADTSTSTAYMELSSLRSEDTAVYYCAGSYYSYDVLWYWGQGTTVTVSSASTKGPSVFPLAPSSKSTSGGTAALGCLVKDYFPEPVTVSWNSGALTSGVHTFPAVLQSSGLYSLSSVVTVPSSSLGTQTYICNVNHKPSNTKVDKKVEPKSC

SEQ ID NO: 1068 - protein, 222 aa, synthetic construct
QVQLVQSGAEVKKPGSSVKVSCKASGYSFTTYYIHWVRQAPGQGLEWMGWFFPGSGNIKYNEKFKGRVTITADTSTSTAYMELSSLRSEDTAVYYCAGSYYSYDVLYYWGQGTTVTVSSASTKGPSVFPLAPSSKSTSGGTAALGCLVKDYFPEPVTVSWNSGALTSGVHTFPAVLQSSGLYSLSSVVTVPSSSLGTQTYICNVNHKPSNTKVDKKVEPKSC

SEQ ID NO: 1069 - protein, 222 aa, synthetic construct
QVQLVQSGAEVKKPGSSVKVSCKASGYSFTTYYIHWVRQAPGQGLEWMGWFFPGSGNIKYNEKFKGRVTITADTSTSTAYMELSSLRSEDTAVYYCAGSYYSYDVLDAWGQGTTVTVSSASTKGPSVFPLAPSSKSTSGGTAALGCLVKDYFPEPVTVSWNSGALTSGVHTFPAVLQSSGLYSLSSVVTVPSSSLGTQTYICNVNHKPSNTKVDKKVEPKSC

SEQ ID NO: 1070 - protein, 222 aa, synthetic construct
QVQLVQSGAEVKKPGSSVKVSCKASGYSFTTYYIHWVRQAPGQGLEWMGWFFPGSGNIKYNEKFKGRVTITADTSTSTAYMELSSLRSEDTAVYYCAGSYYSYDVLDDWGQGTTVTVSSASTKGPSVFPLAPSSKSTSGGTAALGCLVKDYFPEPVTVSWNSGALTSGVHTFPAVLQSSGLYSLSSVVTVPSSSLGTQTYICNVNHKPSNTKVDKKVEPKSC

SEQ ID NO: 1071 - protein, 222 aa, synthetic construct
QVQLVQSGAEVKKPGSSVKVSCKASGYSFTTYYIHWVRQAPGQGLEWMGWFFPGSGNIKYNEKFKGRVTITADTSTSTAYMELSSLRSEDTAVYYCAGSYYSYDVLDEWGQGTTVTVSSASTKGPSVFPLAPSSKSTSGGTAALGCLVKDYFPEPVTVSWNSGALTSGVHTFPAVLQSSGLYSLSSVVTVPSSSLGTQTYICNVNHKPSNTKVDKKVEPKSC

SEQ ID NO: 1072 - protein, 222 aa, synthetic construct
QVQLVQSGAEVKKPGSSVKVSCKASGYSFTTYYIHWVRQAPGQGLEWMGWFFPGSGNIKYNEKFKGRVTITADTSTSTAYMELSSLRSEDTAVYYCAGSYYSYDVLDGWGQGTTVTVSSASTKGPSVFPLAPSSKSTSGGTAALGCLVKDYFPEPVTVSWNSGALTSGVHTFPAVLQSSGLYSLSSVVTVPSSSLGTQTYICNVNHKPSNTKVDKKVEPKSC

SEQ ID NO: 1073 - protein, 222 aa, synthetic construct
QVQLVQSGAEVKKPGSSVKVSCKASGYSFTTYYIHWVRQAPGQGLEWMGWFFPGSGNIKYNEKFKGRVTITADTSTSTAYMELSSLRSEDTAVYYCAGSYYSYDVLDHWGQGTTVTVSSASTKGPSVFPLAPSSKSTSGGTAALGCLVKDYFPEPVTVSWNSGALTSGVHTFPAVLQSSGLYSLSSVVTVPSSSLGTQTYICNVNHKPSNTKVDKKVEPKSC

SEQ ID NO: 1074 - protein, 222 aa, synthetic construct
QVQLVQSGAEVKKPGSSVKVSCKASGYSFTTYYIHWVRQAPGQGLEWMGWFFPGSGNIKYNEKFKGRVTITADTSTSTAYMELSSLRSEDTAVYYCAGSYYSYDVLDIWGQGTTVTVSSASTKGPSVFPLAPSSKSTSGGTAALGCLVKDYFPEPVTVSWNSGALTSGVHTFPAVLQSSGLYSLSSVVTVPSSSLGTQTYICNVNHKPSNTKVDKKVEPKSC

SEQ ID NO: 1075 - protein, 222 aa, synthetic construct
QVQLVQSGAEVKKPGSSVKVSCKASGYSFTTYYIHWVRQAPGQGLEWMGWFFPGSGNIKYNEKFKGRVTITADTSTSTAYMELSSLRSEDTAVYYCAGSYYSYDVLDKWGQGTTVTVSSASTKGPSVFPLAPSSKSTSGGTAALGCLVKDYFPEPVTVSWNSGALTSGVHTFPAVLQSSGLYSLSSVVTVPSSSLGTQTYICNVNHKPSNTKVDKKVEPKSC

SEQ ID NO: 1076 - protein, 222 aa, synthetic construct
QVQLVQSGAEVKKPGSSVKVSCKASGYSFTTYYIHWVRQAPGQGLEWMGWFFPGSGNIKYNEKFKGRVTITADTSTSTAYMELSSLRSEDTAVYYCAGSYYSYDVLDLWGQGTTVTVSSASTKGPSVFPLAPSSKSTSGGTAALGCLVKDYFPEPVTVSWNSGALTSGVHTFPAVLQSSGLYSLSSVVTVPSSSLGTQTYICNVNHKPSNTKVDKKVEPKSC

SEQ ID NO: 1077 - protein, 222 aa, synthetic construct
QVQLVQSGAEVKKPGSSVKVSCKASGYSFTTYYIHWVRQAPGQGLEWMGWFFPGSGNIKYNEKFKGRVTITADTSTSTAYMELSSLRSEDTAVYYCAGSYYSYDVLDMWGQGTTVTVSSASTKGPSVFPLAPSSKSTSGGTAALGCLVKDYFPEPVTVSWNSGALTSGVHTFPAVLQSSGLYSLSSVVTVPSSSLGTQTYICNVNHKPSNTKVDKKVEPKSC

SEQ ID NO: 1078 - protein, 222 aa, synthetic construct
QVQLVQSGAEVKKPGSSVKVSCKASGYSFTTYYIHWVRQAPGQGLEWMGWFFPGSGNIKYNEKFKGRVTITADTSTSTAYMELSSLRSEDTAVYYCAGSYYSYDVLDNWGQGTTVTVSSASTKGPSVFPLAPSSKSTSGGTAALGCLVKDYFPEPVTVSWNSGALTSGVHTFPAVLQSSGLYSLSSVVTVPSSSLGTQTYICNVNHKPSNTKVDKKVEPKSC

SEQ ID NO: 1079 - protein, 222 aa, synthetic construct
QVQLVQSGAEVKKPGSSVKVSCKASGYSFTTYYIHWVRQAPGQGLEWMGWFFPGSGNIKYNEKFKGRVTITADTSTSTAYMELSSLRSEDTAVYYCAGSYYSYDVLDPWGQGTTVTVSSASTKGPSVFPLAPSSKSTSGGTAALGCLVKDYFPEPVTVSWNSGALTSGVHTFPAVLQSSGLYSLSSVVTVPSSSLGTQTYICNVNHKPSNTKVDKKVEPKSC

SEQ ID NO: 1080 - protein, 222 aa, synthetic construct
QVQLVQSGAEVKKPGSSVKVSCKASGYSFTTYYIHWVRQAPGQGLEWMGWFFPGSGNIKYNEKFKGRVTITADTSTSTAYMELSSLRSEDTAVYYCAGSYYSYDVLDQWGQGTTVTVSSASTKGPSVFPLAPSSKSTSGGTAALGCLVKDYFPEPVTVSWNSGALTSGVHTFPAVLQSSGLYSLSSVVTVPSSSLGTQTYICNVNHKPSNTKVDKKVEPKSC

SEQ ID NO: 1081 - protein, 222 aa, synthetic construct
QVQLVQSGAEVKKPGSSVKVSCKASGYSFTTYYIHWVRQAPGQGLEWMGWFFPGSGNIKYNEKFKGRVTITADTSTSTAYMELSSLRSEDTAVYYCAGSYYSYDVLDRWGQGTTVTVSSASTKGPSVFPLAPSSKSTSGGTAALGCLVKDYFPEPVTVSWNSGALTSGVHTFPAVLQSSGLYSLSSVVTVPSSSLGTQTYICNVNHKPSNTKVDKKVEPKSC

SEQ ID NO: 1082 - protein, 222 aa, synthetic construct
QVQLVQSGAEVKKPGSSVKVSCKASGYSFTTYYIHWVRQAPGQGLEWMGWFFPGSGNIKYNEKFKGRVTITADTSTSTAYMELSSLRSEDTAVYYCAGSYYSYDVLDTWGQGTTVTVSSASTKGPSVFPLAPSSKSTSGGTAALGCLVKDYFPEPVTVSWNSGALTSGVHTFPAVLQSSGLYSLSSVVTVPSSSLGTQTYICNVNHKPSNTKVDKKVEPKSC

SEQ ID NO: 1083 - protein, 222 aa, synthetic construct
QVQLVQSGAEVKKPGSSVKVSCKASGYSFTTYYIHWVRQAPGQGLEWMGWFFPGSGNIKYNEKFKGRVTITADTSTSTAYMELSSLRSEDTAVYYCAGSYYSYDVLDVWGQGTTVTVSSASTKGPSVFPLAPSSKSTSGGTAALGCLVKDYFPEPVTVSWNSGALTSGVHTFPAVLQSSGLYSLSSVVTVPSSSLGTQTYICNVNHKPSNTKVDKKVEPKSC

SEQ ID NO: 1084 - protein, 222 aa, synthetic construct
QVQLVQSGAEVKKPGSSVKVSCKASGYSFTTYYIHWVRQAPGQGLEWMGWFFPGSGNIKYNEKFKGRVTITADTSTSTAYMELSSLRSEDTAVYYCAGSYYSYDVLDWWGQGTTVTVSSASTKGPSVFPLAPSSKSTSGGTAALGCLVKDYFPEPVTVSWNSGALTSGVHTFPAVLQSSGLYSLSSVVTVPSSSLGTQTYICNVNHKPSNTKVDKKVEPKSC

SEQ ID NO: 1085 - protein, 214 aa, synthetic construct
DIQMTQSPSFLSASVGDRVTITCKASQNWGINVVWHQQKPGKAPKALIYSSSHRYSGVPSRFSGSGSGTEFTLTISSLQPEDFATYFCQQFKSYPLTFGQGTKLEIKRTVAAPSVFIFPPSDEQLKSGTASVVCLLNNFYPREAKVQWKVDNALQSGNSQESVTEQDSKDSTYSLSSTLTLSKADYEKHKVYACEVTHQGLSSPVTKSFNRGEC

SEQ ID NO: 1086 - protein, 214 aa, synthetic construct
DIQMTQSPSFLSASVGDRVTITCKASQNYGINVVWHQQKPGKAPKALIYSSSHRYSGVPSRFSGSGSGTEFTLTISSLQPEDFATYFCQQFKSYPLTFGQGTKLEIKRTVAAPSVFIFPPSDEQLKSGTASVVCLLNNFYPREAKVQWKVDNALQSGNSQESVTEQDSKDSTYSLSSTLTLSKADYEKHKVYACEVTHQGLSSPVTKSFNRGEC

SEQ ID NO: 1087 - protein, 214 aa, synthetic construct
DIQMTQSPSFLSASVGDRVTITCKASQNVAINVVWHQQKPGKAPKALIYSSSHRYSGVPSRFSGSGSGTEFTLTISSLQPEDFATYFCQQFKSYPLTFGQGTKLEIKRTVAAPSVFIFPPSDEQLKSGTASVVCLLNNFYPREAKVQWKVDNALQSGNSQESVTEQDSKDSTYSLSSTLTLSKADYEKHKVYACEVTHQGLSSPVTKSFNRGEC

SEQ ID NO: 1088 - protein, 214 aa, synthetic construct
DIQMTQSPSFLSASVGDRVTITCKASQNVDINVVWHQQKPGKAPKALIYSSSHRYSGVPSRFSGSGSGTEFTLTISSLQPEDFATYFCQQFKSYPLTFGQGTKLEIKRTVAAPSVFIFPPSDEQLKSGTASVVCLLNNFYPREAKVQWKVDNALQSGNSQESVTEQDSKDSTYSLSSTLTLSKADYEKHKVYACEVTHQGLSSPVTKSFNRGEC

SEQ ID NO: 1089 - protein, 214 aa, synthetic construct
DIQMTQSPSFLSASVGDRVTITCKASQNVEINVVWHQQKPGKAPKALIYSSSHRYSGVPSRFSGSGSGTEFTLTISSLQPEDFATYFCQQFKSYPLTFGQGTKLEIKRTVAAPSVFIFPPSDEQLKSGTASVVCLLNNFYPREAKVQWKVDNALQSGNSQESVTEQDSKDSTYSLSSTLTLSKADYEKHKVYACEVTHQGLSSPVTKSFNRGEC

SEQ ID NO: 1090 - protein, 214 aa, synthetic construct
DIQMTQSPSFLSASVGDRVTITCKASQNVFINVVWHQQKPGKAPKALIYSSSHRYSGVPSRFSGSGSGTEFTLTISSLQPEDFATYFCQQFKSYPLTFGQGTKLEIKRTVAAPSVFIFPPSDEQLKSGTASVVCLLNNFYPREAKVQWKVDNALQSGNSQESVTEQDSKDSTYSLSSTLTLSKADYEKHKVYACEVTHQGLSSPVTKSFNRGEC

SEQ ID NO: 1091 - protein, 214 aa, synthetic construct
DIQMTQSPSFLSASVGDRVTITCKASQNVHINVVWHQQKPGKAPKALIYSSSHRYSGVPSRFSGSGSGTEFTLTISSLQPEDFATYFCQQFKSYPLTFGQGTKLEIKRTVAAPSVFIFPPSDEQLKSGTASVVCLLNNFYPREAKVQWKVDNALQSGNSQESVTEQDSKDSTYSLSSTLTLSKADYEKHKVYACEVTHQGLSSPVTKSFNRGEC

SEQ ID NO: 1092 - protein, 214 aa, synthetic construct
DIQMTQSPSFLSASVGDRVTITCKASQNVIINVVWHQQKPGKAPKALIYSSSHRYSGVPSRFSGSGSGTEFTLTISSLQPEDFATYFCQQFKSYPLTFGQGTKLEIKRTVAAPSVFIFPPSDEQLKSGTASVVCLLNNFYPREAKVQWKVDNALQSGNSQESVTEQDSKDSTYSLSSTLTLSKADYEKHKVYACEVTHQGLSSPVTKSFNRGEC

SEQ ID NO: 1093 - protein, 214 aa, synthetic construct
DIQMTQSPSFLSASVGDRVTITCKASQNVKINVVWHQQKPGKAPKALIYSSSHRYSGVPSRFSGSGSGTEFTLTISSLQPEDFATYFCQQFKSYPLTFGQGTKLEIKRTVAAPSVFIFPPSDEQLKSGTASVVCLLNNFYPREAKVQWKVDNALQSGNSQESVTEQDSKDSTYSLSSTLTLSKADYEKHKVYACEVTHQGLSSPVTKSFNRGEC

SEQ ID NO: 1094 - protein, 214 aa, synthetic construct
DIQMTQSPSFLSASVGDRVTITCKASQNVGINVMWHQQKPGKAPKALIYSSSHRYSGVPSRFSGSGSGTEFTLTISSLQPEDFATYFCQQFKSYPLTFGQGTKLEIKRTVAAPSVFIFPPSDEQLKSGTASVVCLLNNFYPREAKVQWKVDNALQSGNSQESVTEQDSKDSTYSLSSTLTLSKADYEKHKVYACEVTHQGLSSPVTKSFNRGEC

SEQ ID NO: 1095 - protein, 214 aa, synthetic construct
DIQMTQSPSFLSASVGDRVTITCKASQNRGINVVWHQQKPGKAPKALIYSSSHRYSGVPSRFSGSGSGTEFTLTISSLQPEDFATYFCQQFKSYPLTFGQGTKLEIKRTVAAPSVFIFPPSDEQLKSGTASVVCLLNNFYPREAKVQWKVDNALQSGNSQESVTEQDSKDSTYSLSSTLTLSKADYEKHKVYACEVTHQGLSSPVTKSFNRGEC

SEQ ID NO: 1096 - protein, 214 aa, synthetic construct
DIQMTQSPSFLSASVGDRVTITCKASQNVGIRVVWHQQKPGKAPKALIYSSSHRYSGVPSRFSGSGSGTEFTLTISSLQPEDFATYFCQQFKSYPLTFGQGTKLEIKRTVAAPSVFIFPPSDEQLKSGTASVVCLLNNFYPREAKVQWKVDNALQSGNSQESVTEQDSKDSTYSLSSTLTLSKADYEKHKVYACEVTHQGLSSPVTKSFNRGEC

SEQ ID NO: 1097 - protein, 214 aa, synthetic construct
DIQMTQSPSFLSASVGDRVTITCKASQNVGINVVWHQQKPGKAPKALIYSSSHRYMGVPSRFSGSGSGTEFTLTISSLQPEDFATYFCQQFKSYPLTFGQGTKLEIKRTVAAPSVFIFPPSDEQLKSGTASVVCLLNNFYPREAKVQWKVDNALQSGNSQESVTEQDSKDSTYSLSSTLTLSKADYEKHKVYACEVTHQGLSSPVTKSFNRGEC

SEQ ID NO: 1098 - protein, 214 aa, synthetic construct
DIQMTQSPSFLSASVGDRVTITCKASQNVGINVVWHQQKPGKAPKALIYSSSHRYSGVPSRFSGSGSGTEFTLTISSLQPEDFATYFCQSFKSYPLTFGQGTKLEIKRTVAAPSVFIFPPSDEQLKSGTASVVCLLNNFYPREAKVQWKVDNALQSGNSQESVTEQDSKDSTYSLSSTLTLSKADYEKHKVYACEVTHQGLSSPVTKSFNRGEC

SEQ ID NO: 1099 - protein, 222 aa, synthetic construct
QVQLVQSGAEVKKPGSSVKVSCKASGYSFTTWYIHWVRQAPGQGLEWMGWFFPGSGNIKYNEKFKGRVTITADTSTSTAYMELSSLRSEDTAVYYCAASYYSFDVLDYWGQGTTVTVSSASTKGPSVFPLAPSSKSTSGGTAALGCLVKDYFPEPVTVSWNSGALTSGVHTFPAVLQSSGLYSLSSVVTVPSSSLGTQTYICNVNHKPSNTKVDKKVEPKSC

SEQ ID NO: 1100 - protein, 106 aa, synthetic construct
DNQLTQSPSFLSASVGDRVTITCRASSSVNYIYWYQQKPGKAPKLLIYYTSNLAPGVPSRFSGSGSGNEYTLTISSLQPEDFATYYCQQFTSSPFTFGQGTKLEIK

SEQ ID NO: 1101 - protein, 106 aa, synthetic construct
DIQLTQSPSFLSASVGDRVTITCRASSSVNYIYWYQQKPGKAPKLLIYYTSNLAPGVPSRFSGSGSGTEFTLTISSLQPEDFATYYCQQYTSSPFTFGQGTKLEIK

SEQ ID NO: 1102 - protein, 106 aa, synthetic construct
DIQLTQSPSFLSASVGDRVTITCRASQSVNYIYWYQQKPGKAPKLLIYYTSNLAPGVPSRFSGSGSGTEFTLTISSLQPEDFATYYCQQYTSSPFTFGQGTKLEIK

SEQ ID NO: 1103 - protein, 106 aa, synthetic construct
DIQLTQSPSFLSASVGDRVTITCRASQSVNYLYWYQQKPGKAPKLLIYYTSNLAPGVPSRFSGSGSGTEFTLTISSLQPEDFATYYCQQYTSSPFTFGQGTKLEIK

SEQ ID NO: 1104 - protein, 106 aa, synthetic construct
DNQLTQSPSFLSASVGDRVTITCRASRSVNYAYWYQQKPGKAPKLLIYYTSNLAPGVPSRFSGSGSGNEYTLTISSLQPEDFATYYCQQFTSSPFVFGQGTKLEIK

SEQ ID NO: 1105 - protein, 106 aa, synthetic construct
DNQLTQSPSFLSASVGDRVTITCRASSSVNYAYWYQQKPGKAPKLLIYYTSNLAPGVPSRFSGSGSGNEYTLTISSLQPEDFATYYCQQFTSSPFVFGQGTKLEIK

SEQ ID NO: 1106 - protein, 106 aa, synthetic construct
DNQLTQSPSFLSASVGDRVTITCRASKSVNYAYWYQQKPGKAPKLLIYYTSNLAPGVPSRFSGSGSGNEYTLTISSLQPEDFATYYCQQFTSSPFVFGQGTKLEIK

SEQ ID NO: 1107 - protein, 106 aa, synthetic construct
DNQLTQSPSFLSASVGDRVTITCRASKSVNYIYWYQQKPGKAPKLLIYYTSNLAPGVPSRFSGSGSGNEYTLTISSLQPEDFATYYCQQFTSSPFTFGQGTKLEIK

SEQ ID NO: 1108 - protein, 106 aa, synthetic construct
DNQLTQSPSFLSASVGDRVTITCRASRSVNYAYWYQQKPGKAPKLLIYYTSNLAPGVPSRFSGSGSGNEYTLTISSLQPEDFATYYCQQFTSSPFTFGQGTKLEIK

SEQ ID NO: 1109 - protein, 106 aa, synthetic construct
DNQLTQSPSFLSASVGDRVTITCRASKSVNYIYWYQQKPGKAPKLLIYYTSNLAPGVPSRFSGSGSGNEYTLTISSLQPEDFATYYCQQFTSSPFVFGQGTKLEIK

SEQ ID NO: 1110 - protein, 106 aa, synthetic construct
DNQLTQSPSFLSASVGDRVTITCRASRSVNYIYWYQQKPGKAPKLLIYYTSNLAPGVPSRFSGSGSGNEYTLTISSLQPEDFATYYCQQFTSSPFVFGQGTKLEIK

SEQ ID NO: 1111 - protein, 106 aa, synthetic construct
DNQLTQSPSFLSASVGDRVTITCRASSSVNYAYWYQQKPGKAPKLLIYYTSNLAPGVPSRFSGSGSGNEYTLTISSLQPEDFATYYCQQFTSSPFTFGQGTKLEIK

SEQ ID NO: 1112 - protein, 106 aa, synthetic construct
DNQLTQSPSFLSASVGDRVTITCRASKSVNYAYWYQQKPGKAPKLLIYYTSNLAPGVPSRFSGSGSGNEYTLTISSLQPEDFATYYCQQFTSSPFTFGQGTKLEIK

SEQ ID NO: 1113 - protein, 117 aa, synthetic construct
EVQLVESGGGLVQPGGSLRLSCAASGFTFSNFGMHWVRQAPGKGLEWVSYISSGSSTIYYADTLKGRFTISRDNSKNTLYLQMNSLRAEDTAVYYCARRGEGAMDYWGQGTTVTVSS

SEQ ID NO: 1114 - protein, 117 aa, synthetic construct
EVQLVESGGGLVQPGGSLRLSCAASGFTFSNFGMHWVRQAPGKGLEWVSYISSGSSTIYYADTLKGRFTISRDNSKNTLYLQMNSLRAEDTAVYYCARRGEGAMDYWGQGTLVTVSS

SEQ ID NO: 1115 - protein, 117 aa, synthetic construct
EVQLVESGGGLVQPGGSLRLSCAASGFTFSNYGMHWVRQAPGKGLEWVSYISSGSSTIYYADALKGRFTISRDNSKNTLYLQMNSLRAEDTAVYYCARRGEGAMDYWGQGTLVTVSS

SEQ ID NO: 1116 - protein, 117 aa, synthetic construct
EVQLVESGGGLVQPGGSLRLSCAASGFTFSIFGMHWVRQAPGKGLEWVSYISSTSSTILYADTLKGRFTISRDNSKNTLYLQMNSLRAEDTAVYYCARRGEGAMDYWGQGTTVTVSS

SEQ ID NO: 1117 - protein, 117 aa, synthetic construct
EVQLVESGGGLVQPGGSLRLSCAASGFTFSRTGMHWVRQAPGKGLEWVSYISSSSSTILYADTLKGRFTISRDNSKNTLYLQMNSLRAEDTAVYYCARRGEGAMDYWGQGTTVTVSS

SEQ ID NO: 1118 - protein, 117 aa, synthetic construct
EVQLVESGGGLVQPGGSLRLSCAASGFTFSIKGMHWVRQAPGKGLEWVSYISSGSSTIYYADTLKGRFTISRDNSKNTLYLQMNSLRAEDTAVYYCARRGAGAMDYWGQGTTVTVSS

SEQ ID NO: 1119 - protein, 117 aa, synthetic construct
EVQLVESGGGLVQPGGSLRLSCAASGFTFSNKGMHWVRQAPGKGLEWVSYISSSSSTIYYADTLKGRFTISRDNSKNTLYLQMNSLRAEDTAVYYCARRGEGAMDYWGQGTTVTVSS

SEQ ID NO: 1120 - protein, 117 aa, synthetic construct
EVQLVESGGGLVQPGGSLRLSCAASGFTFSLFGMHWVRQAPGKGLEWVSYISSWSSTILYADTLKGRFTISRDNSKNTLYLQMNSLRAEDTAVYYCARRGAGAMDYWGQGTTVTVSS

SEQ ID NO: 1121 - protein, 117 aa, synthetic construct
EVQLVESGGGLVQPGGSLRLSCAASGFTFSIFGMHWVRQAPGKGLEWVSYISSWSSTIYYADTLKGRFTISRDNSKNTLYLQMNSLRAEDTAVYYCARRGEGAMDYWGQGTTVTVSS

SEQ ID NO: 1122 - protein, 117 aa, synthetic construct
EVQLVESGGGLVQPGGSLRLSCAASGFTFSRFGMHWVRQAPGKGLEWVSYISSWSSTILYADTLKGRFTISRDNSKNTLYLQMNSLRAEDTAVYYCARRGEGAMDYWGQGTTVTVSS

SEQ ID NO: 1123 - protein, 117 aa, synthetic construct
EVQLVESGGGLVQPGGSLRLSCAASGFTFSRKGMHWVRQAPGKGLEWVSYISSTSSTILYADTLKGRFTISRDNSKNTLYLQMNSLRAEDTAVYYCARRGEGAMDYWGQGTTVTVSS

SEQ ID NO: 1124 - protein, 117 aa, synthetic construct
EVQLVESGGGLVQPGGSLRLSCAASGFTFSIFGMHWVRQAPGKGLEWVSYISSWSSTIYYADTLKGRFTISRDNSKNTLYLQMNSLRAEDTAVYYCARRGAGAMDYWGQGTTVTVSS

SEQ ID NO: 1125 - protein, 117 aa, synthetic construct
EVQLVESGGGLVQPGGSLRLSCAASGFTFSIFGMHWVRQAPGKGLEWVSYISSSSSTILYADTLKGRFTISRDNSKNTLYLQMNSLRAEDTAVYYCARRGAGAMDYWGQGTTVTVSS

SEQ ID NO: 1126 - protein, 117 aa, synthetic construct
EVQLVESGGGLVQPGGSLRLSCAASGFTFSNKGMHWVRQAPGKGLEWVSYISSSSSTILYADTLKGRFTISRDNSKNTLYLQMNSLRAEDTAVYYCARRGAGAMDYWGQGTTVTVSS

SEQ ID NO: 1127 - protein, 117 aa, synthetic construct
EVQLVESGGGLVQPGGSLRLSCAASGFTFSRFGMHWVRQAPGKGLEWVSYISSTSSTIYYADTLKGRFTISRDNSKNTLYLQMNSLRAEDTAVYYCARRGEGAMDYWGQGTTVTVSS

SEQ ID NO: 1128 - protein, 117 aa, synthetic construct
EVQLVESGGGLVQPGGSLRLSCAASGFTFSITGMHWVRQAPGKGLEWVSYISSWSSTIYYADTLKGRFTISRDNSKNTLYLQMNSLRAEDTAVYYCARRGAGAMDYWGQGTTVTVSS

SEQ ID NO: 1129 - protein, 117 aa, synthetic construct
EVQLVESGGGLVQPGGSLRLSCAASGFTFSRKGMHWVRQAPGKGLEWVSYISSGSSTIYYADTLKGRFTISRDNSKNTLYLQMNSLRAEDTAVYYCARRGAGAMDYWGQGTTVTVSS

SEQ ID NO: 1130 - protein, 117 aa, synthetic construct
EVQLVESGGGLVQPGGSLRLSCAASGFTFSITGMHWVRQAPGKGLEWVSYISSTSSTILYADTLKGRFTISRDNSKNTLYLQMNSLRAEDTAVYYCARRGEGAMDYWGQGTTVTVSS

SEQ ID NO: 1131 - protein, 117 aa, synthetic construct
EVQLVESGGGLVQPGGSLRLSCAASGFTFSIKGMHWVRQAPGKGLEWVSYISSSSSTILYADTLKGRFTISRDNSKNTLYLQMNSLRAEDTAVYYCARRGAGAMDYWGQGTTVTVSS

SEQ ID NO: 1132 - protein, 117 aa, synthetic construct
EVQLVESGGGLVQPGGSLRLSCAASGFTFSRKGMHWVRQAPGKGLEWVSYISSWSSTIYYADTLKGRFTISRDNSKNTLYLQMNSLRAEDTAVYYCARRGAGAMDYWGQGTTVTVSS

SEQ ID NO: 1133 - protein, 117 aa, synthetic construct
EVQLVESGGGLVQPGGSLRLSCAASGFTFSIYGMHWVRQAPGKGLEWVSYISSTSSTILYADTLKGRFTISRDNSKNTLYLQMNSLRAEDTAVYYCARRGAGAMDYWGQGTTVTVSS

SEQ ID NO: 1134 - protein, 117 aa, synthetic construct
EVQLVESGGGLVQPGGSLRLSCAASGFTFSRTGMHWVRQAPGKGLEWVSYISSGSSTILYADTLKGRFTISRDNSKNTLYLQMNSLRAEDTAVYYCARRGEGAMDYWGQGTTVTVSS

SEQ ID NO: 1135 - protein, 117 aa, synthetic construct
EVQLVESGGGLVQPGGSLRLSCAASGFTFSNTGMHWVRQAPGKGLEWVSYISSTSSTILYADTLKGRFTISRDNSKNTLYLQMNSLRAEDTAVYYCARRGAGAMDYWGQGTTVTVSS

SEQ ID NO: 1136 - protein, 117 aa, synthetic construct
EVQLVESGGGLVQPGGSLRLSCAASGFTFSNKGMHWVRQAPGKGLEWVSYISSGSSTILYADTLKGRFTISRDNSKNTLYLQMNSLRAEDTAVYYCARRGEGAMDYWGQGTTVTVSS

SEQ ID NO: 1137 - protein, 117 aa, synthetic construct
EVQLVESGGGLVQPGGSLRLSCAASGFTFSITGMHWVRQAPGKGLEWVSYISSTSSTILYADTLKGRFTISRDNSKNTLYLQMNSLRAEDTAVYYCARRGAGAMDYWGQGTTVTVSS

SEQ ID NO: 1138 - protein, 117 aa, synthetic construct
EVQLVESGGGLVQPGGSLRLSCAASGFTFSITGMHWVRQAPGKGLEWVSYISSSSSTIYYADTLKGRFTISRDNSKNTLYLQMNSLRAEDTAVYYCARRGAGAMDYWGQGTTVTVSS

SEQ ID NO: 1139 - protein, 117 aa, synthetic construct
EVQLVESGGGLVQPGGSLRLSCAASGFTFSRTGMHWVRQAPGKGLEWVSYISSWSSTIYYADTLKGRFTISRDNSKNTLYLQMNSLRAEDTAVYYCARRGEGAMDYWGQGTTVTVSS

SEQ ID NO: 1140 - protein, 117 aa, synthetic construct
EVQLVESGGGLVQPGGSLRLSCAASGFTFSNFGMHWVRQAPGKGLEWVSYISSWSSTIYYADTLKGRFTISRDNSKNTLYLQMNSLRAEDTAVYYCARRGAGAMDYWGQGTTVTVSS

SEQ ID NO: 1141 - protein, 117 aa, synthetic construct
EVQLVESGGGLVQPGGSLRLSCAASGFTFSNTGMHWVRQAPGKGLEWVSYISSTSSTILYADTLKGRFTISRDNSKNTLYLQMNSLRAEDTAVYYCARRGEGAMDYWGQGTTVTVSS

SEQ ID NO: 1142 - protein, 117 aa, synthetic construct
EVQLVESGGGLVQPGGSLRLSCAASGFTFSNTGMHWVRQAPGKGLEWVSYISSSSSTILYADTLKGRFTISRDNSKNTLYLQMNSLRAEDTAVYYCARRGAGAMDYWGQGTTVTVSS

SEQ ID NO: 1143 - protein, 117 aa, synthetic construct
EVQLVESGGGLVQPGGSLRLSCAASGFTFSRTGMHWVRQAPGKGLEWVSYISSWSSTILYADTLKGRFTISRDNSKNTLYLQMNSLRAEDTAVYYCARRGAGAMDYWGQGTTVTVSS

SEQ ID NO: 1144 - protein, 117 aa, synthetic construct
EVQLVESGGGLVQPGGSLRLSCAASGFTFSNKGMHWVRQAPGKGLEWVSYISSWSSTILYADTLKGRFTISRDNSKNTLYLQMNSLRAEDTAVYYCARRGAGAMDYWGQGTTVTVSS

SEQ ID NO: 1145 - protein, 117 aa, synthetic construct
EVQLVESGGGLVQPGGSLRLSCAASGFTFSNKGMHWVRQAPGKGLEWVSYISSGSSTILYADTLKGRFTISRDNSKNTLYLQMNSLRAEDTAVYYCARRGAGAMDYWGQGTTVTVSS

SEQ ID NO: 1146 - protein, 117 aa, synthetic construct
EVQLVESGGGLVQPGGSLRLSCAASGFTFSNTGMHWVRQAPGKGLEWVSYISSSSSTIYYADTLKGRFTISRDNSKNTLYLQMNSLRAEDTAVYYCARRGAGAMDYWGQGTTVTVSS

SEQ ID NO: 1147 - protein, 117 aa, synthetic construct
EVQLVESGGGLVQPGGSLRLSCAASGFTFSITGMHWVRQAPGKGLEWVSYISSSSSTILYADTLKGRFTISRDNSKNTLYLQMNSLRAEDTAVYYCARRGEGAMDYWGQGTTVTVSS

SEQ ID NO: 1148 - protein, 10 aa, synthetic construct
RASSSVNYIY

SEQ ID NO: 1149 - protein, 10 aa, synthetic construct
RASQSVNYIY

SEQ ID NO: 1150 - protein, 10 aa, synthetic construct
RASQSVNYLY

SEQ ID NO: 1151 - protein, 10 aa, synthetic construct
RASRSVNYAY

SEQ ID NO: 1152 - protein, 10 aa, synthetic construct
RASKSVNYAY

SEQ ID NO: 1153 - protein, 10 aa, synthetic construct
RASKSVNYIY

SEQ ID NO: 1154 - protein, 10 aa, synthetic construct
RASSSVNYAY

SEQ ID NO: 1155 - protein, 10 aa, synthetic construct
RASRSVNYIY

SEQ ID NO: 1156 - protein, 7 aa, synthetic construct
YTSNLAP

SEQ ID NO: 1157 - protein, 9 aa, synthetic construct
QQFTSSPFT

SEQ ID NO: 1158 - protein, 9 aa, synthetic construct
QQYTSSPFT

SEQ ID NO: 1159 - protein, 9 aa, synthetic construct
QQFTSSPFV

SEQ ID NO: 1160 - protein, 5 aa, synthetic construct
NFGMH

SEQ ID NO: 1161 - protein, 5 aa, synthetic construct
NYGMH

SEQ ID NO: 1162 - protein, 5 aa, synthetic construct
IFGMH

SEQ ID NO: 1163 - protein, 5 aa, synthetic construct
RTGMH

SEQ ID NO: 1164 - protein, 5 aa, synthetic construct
IKGMH

SEQ ID NO: 1165 - protein, 5 aa, synthetic construct
NKGMH

SEQ ID NO: 1166 - protein, 5 aa, synthetic construct
RFGMH

SEQ ID NO: 1167 - protein, 5 aa, synthetic construct
RKGMH

SEQ ID NO: 1168 - protein, 5 aa, synthetic construct
ITGMH

SEQ ID NO: 1169 - protein, 5 aa, synthetic construct
IYGMH

SEQ ID NO: 1170 - protein, 5 aa, synthetic construct
NTGMH

SEQ ID NO: 1171 - protein, 17 aa, synthetic construct
YISSGSSTIYYADTLKG

SEQ ID NO: 1172 - protein, 17 aa, synthetic construct
YISSGSSTIYYADALKG

SEQ ID NO: 1173 - protein, 17 aa, synthetic construct
YISSTSSTILYADTLKG

SEQ ID NO: 1174 - protein, 17 aa, synthetic construct
YISSSSSTILYADTLKG

SEQ ID NO: 1175 - protein, 17 aa, synthetic construct
YISSSSSTIYYADTLKG

SEQ ID NO: 1176 - protein, 17 aa, synthetic construct
YISSWSSTILYADTLKG

SEQ ID NO: 1177 - protein, 17 aa, synthetic construct
YISSWSSTIYYADTLKG

SEQ ID NO: 1178 - protein, 17 aa, synthetic construct
YISSTSSTIYYADTLKG

SEQ ID NO: 1179 - protein, 17 aa, synthetic construct
YISSGSSTILYADTLKG

SEQ ID NO: 1180 - protein, 8 aa, synthetic construct
RGEGAMDY

SEQ ID NO: 1181 - protein, 8 aa, synthetic construct
RGAGAMDY

SEQ ID NO: 1182 - protein, 5 aa, synthetic construct
SSVNY

SEQ ID NO: 1183 - protein, 5 aa, synthetic construct
QSVNY

SEQ ID NO: 1184 - protein, 5 aa, synthetic construct
RSVNY

SEQ ID NO: 1185 - protein, 5 aa, synthetic construct
KSVNY

SEQ ID NO: 1186 - protein, 8 aa, synthetic construct
GFTFSNFG

SEQ ID NO: 1187 - protein, 8 aa, synthetic construct
GFTFSNYG

SEQ ID NO: 1188 - protein, 8 aa, synthetic construct
GFTFSIFG

SEQ ID NO: 1189 - protein, 8 aa, synthetic construct
GFTFSRTG

SEQ ID NO: 1190 - protein, 8 aa, synthetic construct
GFTFSIKG

SEQ ID NO: 1191 - protein, 8 aa, synthetic construct
GFTFSNKG

SEQ ID NO: 1192 - protein, 8 aa, synthetic construct
GFTFSRFG

SEQ ID NO: 1193 - protein, 8 aa, synthetic construct
GFTFSRKG

SEQ ID NO: 1194 - protein, 8 aa, synthetic construct
GFTFSITG

SEQ ID NO: 1195 - protein, 8 aa, synthetic construct
GFTFSIYG

SEQ ID NO: 1196 - protein, 8 aa, synthetic construct
GFTFSNTG

SEQ ID NO: 1197 - protein, 8 aa, synthetic construct
ISSGSSTI

SEQ ID NO: 1198 - protein, 8 aa, synthetic construct
ISSTSSTI

SEQ ID NO: 1199 - protein, 8 aa, synthetic construct
ISSSSSTI

SEQ ID NO: 1200 - protein, 8 aa, synthetic construct
ISSWSSTI

SEQ ID NO: 1201 - protein, 10 aa, synthetic construct
ARRGEGAMDY

SEQ ID NO: 1202 - protein, 10 aa, synthetic construct
ARRGAGAMDY

SEQ ID NO: 1203 - protein, 238 aa, synthetic construct
EVQLVESGGGLVQPGGSLRLSCAASGFTFSNFGMHWVRQAPGKGLEWVSYISSGSSTIYYADTLKGRFTISRDNSKNTLYLQMNSLRAEDTAVYYCARRGEGAMDYWGQGTTVTVSSGGGGSGGGGSGGGGSDNQLTQSPSFLSASVGDRVTITCRASSSVNYIYWYQQKPGKAPKLLIYYTSNLAPGVPSRFSGSGSGNEYTLTISSLQPEDFATYYCQQFTSSPFTFGQGTKLEIK

SEQ ID NO: 1204 - protein, 238 aa, synthetic construct
EVQLVESGGGLVQPGGSLRLSCAASGFTFSIFGMHWVRQAPGKGLEWVSYISSTSSTILYADTLKGRFTISRDNSKNTLYLQMNSLRAEDTAVYYCARRGEGAMDYWGQGTTVTVSSGGGGSGGGGSGGGGSDNQLTQSPSFLSASVGDRVTITCRASRSVNYAYWYQQKPGKAPKLLIYYTSNLAPGVPSRFSGSGSGNEYTLTISSLQPEDFATYYCQQFTSSPFVFGQGTKLEIK

SEQ ID NO: 1205 - protein, 238 aa, synthetic construct
EVQLVESGGGLVQPGGSLRLSCAASGFTFSIFGMHWVRQAPGKGLEWVSYISSTSSTILYADTLKGRFTISRDNSKNTLYLQMNSLRAEDTAVYYCARRGEGAMDYWGQGTTVTVSSGGGGSGGGGSGGGGSDNQLTQSPSFLSASVGDRVTITCRASSSVNYAYWYQQKPGKAPKLLIYYTSNLAPGVPSRFSGSGSGNEYTLTISSLQPEDFATYYCQQFTSSPFVFGQGTKLEIK

SEQ ID NO: 1206 - protein, 238 aa, synthetic construct
EVQLVESGGGLVQPGGSLRLSCAASGFTFSRTGMHWVRQAPGKGLEWVSYISSSSSTILYADTLKGRFTISRDNSKNTLYLQMNSLRAEDTAVYYCARRGEGAMDYWGQGTTVTVSSGGGGSGGGGSGGGGSDNQLTQSPSFLSASVGDRVTITCRASRSVNYAYWYQQKPGKAPKLLIYYTSNLAPGVPSRFSGSGSGNEYTLTISSLQPEDFATYYCQQFTSSPFVFGQGTKLEIK

SEQ ID NO: 1207 - protein, 238 aa, synthetic construct
EVQLVESGGGLVQPGGSLRLSCAASGFTFSIKGMHWVRQAPGKGLEWVSYISSGSSTIYYADTLKGRFTISRDNSKNTLYLQMNSLRAEDTAVYYCARRGAGAMDYWGQGTTVTVSSGGGGSGGGGSGGGGSDNQLTQSPSFLSASVGDRVTITCRASKSVNYAYWYQQKPGKAPKLLIYYTSNLAPGVPSRFSGSGSGNEYTLTISSLQPEDFATYYCQQFTSSPFVFGQGTKLEIK

SEQ ID NO: 1208 - protein, 238 aa, synthetic construct
EVQLVESGGGLVQPGGSLRLSCAASGFTFSNKGMHWVRQAPGKGLEWVSYISSSSSTIYYADTLKGRFTISRDNSKNTLYLQMNSLRAEDTAVYYCARRGEGAMDYWGQGTTVTVSSGGGGSGGGGSGGGGSDNQLTQSPSFLSASVGDRVTITCRASKSVNYIYWYQQKPGKAPKLLIYYTSNLAPGVPSRFSGSGSGNEYTLTISSLQPEDFATYYCQQFTSSPFTFGQGTKLEIK

SEQ ID NO: 1209 - protein, 238 aa, synthetic construct
EVQLVESGGGLVQPGGSLRLSCAASGFTFSLFGMHWVRQAPGKGLEWVSYISSWSSTILYADTLKGRFTISRDNSKNTLYLQMNSLRAEDTAVYYCARRGAGAMDYWGQGTTVTVSSGGGGSGGGGSGGGGSDNQLTQSPSFLSASVGDRVTITCRASSSVNYAYWYQQKPGKAPKLLIYYTSNLAPGVPSRFSGSGSGNEYTLTISSLQPEDFATYYCQQFTSSPFVFGQGTKLEIK

SEQ ID NO: 1210 - protein, 238 aa, synthetic construct
EVQLVESGGGLVQPGGSLRLSCAASGFTFSIFGMHWVRQAPGKGLEWVSYISSWSSTIYYADTLKGRFTISRDNSKNTLYLQMNSLRAEDTAVYYCARRGEGAMDYWGQGTTVTVSSGGGGSGGGGSGGGGSDNQLTQSPSFLSASVGDRVTITCRASRSVNYAYWYQQKPGKAPKLLIYYTSNLAPGVPSRFSGSGSGNEYTLTISSLQPEDFATYYCQQFTSSPFTFGQGTKLEIK

SEQ ID NO: 1211 - protein, 238 aa, synthetic construct
EVQLVESGGGLVQPGGSLRLSCAASGFTFSRFGMHWVRQAPGKGLEWVSYISSWSSTILYADTLKGRFTISRDNSKNTLYLQMNSLRAEDTAVYYCARRGEGAMDYWGQGTTVTVSSGGGGSGGGGSGGGGSDNQLTQSPSFLSASVGDRVTITCRASKSVNYIYWYQQKPGKAPKLLIYYTSNLAPGVPSRFSGSGSGNEYTLTISSLQPEDFATYYCQQFTSSPFVFGQGTKLEIK

SEQ ID NO: 1212 - protein, 238 aa, synthetic construct
EVQLVESGGGLVQPGGSLRLSCAASGFTFSRKGMHWVRQAPGKGLEWVSYISSTSSTILYADTLKGRFTISRDNSKNTLYLQMNSLRAEDTAVYYCARRGEGAMDYWGQGTTVTVSSGGGGSGGGGSGGGGSDNQLTQSPSFLSASVGDRVTITCRASRSVNYIYWYQQKPGKAPKLLIYYTSNLAPGVPSRFSGSGSGNEYTLTISSLQPEDFATYYCQQFTSSPFVFGQGTKLEIK

SEQ ID NO: 1213 - protein, 238 aa, synthetic construct
EVQLVESGGGLVQPGGSLRLSCAASGFTFSIFGMHWVRQAPGKGLEWVSYISSWSSTIYYADTLKGRFTISRDNSKNTLYLQMNSLRAEDTAVYYCARRGAGAMDYWGQGTTVTVSSGGGGSGGGGSGGGGSDNQLTQSPSFLSASVGDRVTITCRASSSVNYAYWYQQKPGKAPKLLIYYTSNLAPGVPSRFSGSGSGNEYTLTISSLQPEDFATYYCQQFTSSPFVFGQGTKLEIK

SEQ ID NO: 1214 - protein, 238 aa, synthetic construct
EVQLVESGGGLVQPGGSLRLSCAASGFTFSIFGMHWVRQAPGKGLEWVSYISSSSSTILYADTLKGRFTISRDNSKNTLYLQMNSLRAEDTAVYYCARRGAGAMDYWGQGTTVTVSSGGGGSGGGGSGGGGSDNQLTQSPSFLSASVGDRVTITCRASSSVNYAYWYQQKPGKAPKLLIYYTSNLAPGVPSRFSGSGSGNEYTLTISSLQPEDFATYYCQQFTSSPFVFGQGTKLEIK

SEQ ID NO: 1215 - protein, 238 aa, synthetic construct
EVQLVESGGGLVQPGGSLRLSCAASGFTFSNKGMHWVRQAPGKGLEWVSYISSSSSTILYADTLKGRFTISRDNSKNTLYLQMNSLRAEDTAVYYCARRGAGAMDYWGQGTTVTVSSGGGGSGGGGSGGGGSDNQLTQSPSFLSASVGDRVTITCRASSSVNYAYWYQQKPGKAPKLLIYYTSNLAPGVPSRFSGSGSGNEYTLTISSLQPEDFATYYCQQFTSSPFTFGQGTKLEIK

SEQ ID NO: 1216 - protein, 238 aa, synthetic construct
EVQLVESGGGLVQPGGSLRLSCAASGFTFSRFGMHWVRQAPGKGLEWVSYISSTSSTIYYADTLKGRFTISRDNSKNTLYLQMNSLRAEDTAVYYCARRGEGAMDYWGQGTTVTVSSGGGGSGGGGSGGGGSDNQLTQSPSFLSASVGDRVTITCRASRSVNYAYWYQQKPGKAPKLLIYYTSNLAPGVPSRFSGSGSGNEYTLTISSLQPEDFATYYCQQFTSSPFTFGQGTKLEIK

SEQ ID NO: 1217 - protein, 238 aa, synthetic construct
EVQLVESGGGLVQPGGSLRLSCAASGFTFSITGMHWVRQAPGKGLEWVSYISSWSSTIYYADTLKGRFTISRDNSKNTLYLQMNSLRAEDTAVYYCARRGAGAMDYWGQGTTVTVSSGGGGSGGGGSGGGGSDNQLTQSPSFLSASVGDRVTITCRASKSVNYIYWYQQKPGKAPKLLIYYTSNLAPGVPSRFSGSGSGNEYTLTISSLQPEDFATYYCQQFTSSPFVFGQGTKLEIK

SEQ ID NO: 1218 - protein, 238 aa, synthetic construct
EVQLVESGGGLVQPGGSLRLSCAASGFTFSRKGMHWVRQAPGKGLEWVSYISSGSSTIYYADTLKGRFTISRDNSKNTLYLQMNSLRAEDTAVYYCARRGAGAMDYWGQGTTVTVSSGGGGSGGGGSGGGGSDNQLTQSPSFLSASVGDRVTITCRASSSVNYAYWYQQKPGKAPKLLIYYTSNLAPGVPSRFSGSGSGNEYTLTISSLQPEDFATYYCQQFTSSPFTFGQGTKLEIK

SEQ ID NO: 1219 - protein, 238 aa, synthetic construct
EVQLVESGGGLVQPGGSLRLSCAASGFTFSITGMHWVRQAPGKGLEWVSYISSTSSTILYADTLKGRFTISRDNSKNTLYLQMNSLRAEDTAVYYCARRGEGAMDYWGQGTTVTVSSGGGGSGGGGSGGGGSDNQLTQSPSFLSASVGDRVTITCRASKSVNYIYWYQQKPGKAPKLLIYYTSNLAPGVPSRFSGSGSGNEYTLTISSLQPEDFATYYCQQFTSSPFTFGQGTKLEIK

SEQ ID NO: 1220 - protein, 238 aa, synthetic construct
EVQLVESGGGLVQPGGSLRLSCAASGFTFSIKGMHWVRQAPGKGLEWVSYISSSSSTILYADTLKGRFTISRDNSKNTLYLQMNSLRAEDTAVYYCARRGAGAMDYWGQGTTVTVSSGGGGSGGGGSGGGGSDNQLTQSPSFLSASVGDRVTITCRASKSVNYIYWYQQKPGKAPKLLIYYTSNLAPGVPSRFSGSGSGNEYTLTISSLQPEDFATYYCQQFTSSPFVFGQGTKLEIK

SEQ ID NO: 1221 - protein, 238 aa, synthetic construct
EVQLVESGGGLVQPGGSLRLSCAASGFTFSRKGMHWVRQAPGKGLEWVSYISSWSSTIYYADTLKGRFTISRDNSKNTLYLQMNSLRAEDTAVYYCARRGAGAMDYWGQGTTVTVSSGGGGSGGGGSGGGGSDNQLTQSPSFLSASVGDRVTITCRASSSVNYAYWYQQKPGKAPKLLIYYTSNLAPGVPSRFSGSGSGNEYTLTISSLQPEDFATYYCQQFTSSPFTFGQGTKLEIK

SEQ ID NO: 1222 - protein, 238 aa, synthetic construct
EVQLVESGGGLVQPGGSLRLSCAASGFTFSIFGMHWVRQAPGKGLEWVSYISSTSSTILYADTLKGRFTISRDNSKNTLYLQMNSLRAEDTAVYYCARRGEGAMDYWGQGTTVTVSSGGGGSGGGGSGGGGSDNQLTQSPSFLSASVGDRVTITCRASRSVNYAYWYQQKPGKAPKLLIYYTSNLAPGVPSRFSGSGSGNEYTLTISSLQPEDFATYYCQQFTSSPFTFGQGTKLEIK

SEQ ID NO: 1223 - protein, 238 aa, synthetic construct
EVQLVESGGGLVQPGGSLRLSCAASGFTFSIYGMHWVRQAPGKGLEWVSYISSTSSTILYADTLKGRFTISRDNSKNTLYLQMNSLRAEDTAVYYCARRGAGAMDYWGQGTTVTVSSGGGGSGGGGSGGGGSDNQLTQSPSFLSASVGDRVTITCRASSSVNYAYWYQQKPGKAPKLLIYYTSNLAPGVPSRFSGSGSGNEYTLTISSLQPEDFATYYCQQFTSSPFTFGQGTKLEIK

SEQ ID NO: 1224 - protein, 238 aa, synthetic construct
EVQLVESGGGLVQPGGSLRLSCAASGFTFSRTGMHWVRQAPGKGLEWVSYISSGSSTILYADTLKGRFTISRDNSKNTLYLQMNSLRAEDTAVYYCARRGEGAMDYWGQGTTVTVSSGGGGSGGGGSGGGGSDNQLTQSPSFLSASVGDRVTITCRASKSVNYAYWYQQKPGKAPKLLIYYTSNLAPGVPSRFSGSGSGNEYTLTISSLQPEDFATYYCQQFTSSPFVFGQGTKLEIK

SEQ ID NO: 1225 - protein, 238 aa, synthetic construct
EVQLVESGGGLVQPGGSLRLSCAASGFTFSNTGMHWVRQAPGKGLEWVSYISSTSSTILYADTLKGRFTISRDNSKNTLYLQMNSLRAEDTAVYYCARRGAGAMDYWGQGTTVTVSSGGGGSGGGGSGGGGSDNQLTQSPSFLSASVGDRVTITCRASRSVNYAYWYQQKPGKAPKLLIYYTSNLAPGVPSRFSGSGSGNEYTLTISSLQPEDFATYYCQQFTSSPFTFGQGTKLEIK

SEQ ID NO: 1226 - protein, 238 aa, synthetic construct
EVQLVESGGGLVQPGGSLRLSCAASGFTFSNKGMHWVRQAPGKGLEWVSYISSGSSTILYADTLKGRFTISRDNSKNTLYLQMNSLRAEDTAVYYCARRGEGAMDYWGQGTTVTVSSGGGGSGGGGSGGGGSDNQLTQSPSFLSASVGDRVTITCRASKSVNYAYWYQQKPGKAPKLLIYYTSNLAPGVPSRFSGSGSGNEYTLTISSLQPEDFATYYCQQFTSSPFTFGQGTKLEIK

SEQ ID NO: 1227 - protein, 238 aa, synthetic construct
EVQLVESGGGLVQPGGSLRLSCAASGFTFSITGMHWVRQAPGKGLEWVSYISSTSSTILYADTLKGRFTISRDNSKNTLYLQMNSLRAEDTAVYYCARRGAGAMDYWGQGTTVTVSSGGGGSGGGGSGGGGSDNQLTQSPSFLSASVGDRVTITCRASRSVNYIYWYQQKPGKAPKLLIYYTSNLAPGVPSRFSGSGSGNEYTLTISSLQPEDFATYYCQQFTSSPFVFGQGTKLEIK

SEQ ID NO: 1228 - protein, 238 aa, synthetic construct
EVQLVESGGGLVQPGGSLRLSCAASGFTFSRFGMHWVRQAPGKGLEWVSYISSTSSTIYYADTLKGRFTISRDNSKNTLYLQMNSLRAEDTAVYYCARRGEGAMDYWGQGTTVTVSSGGGGSGGGGSGGGGSDNQLTQSPSFLSASVGDRVTITCRASRSVNYAYWYQQKPGKAPKLLIYYTSNLAPGVPSRFSGSGSGNEYTLTISSLQPEDFATYYCQQFTSSPFVFGQGTKLEIK

SEQ ID NO: 1229 - protein, 238 aa, synthetic construct
EVQLVESGGGLVQPGGSLRLSCAASGFTFSITGMHWVRQAPGKGLEWVSYISSSSSTIYYADTLKGRFTISRDNSKNTLYLQMNSLRAEDTAVYYCARRGAGAMDYWGQGTTVTVSSGGGGSGGGGSGGGGSDNQLTQSPSFLSASVGDRVTITCRASKSVNYAYWYQQKPGKAPKLLIYYTSNLAPGVPSRFSGSGSGNEYTLTISSLQPEDFATYYCQQFTSSPFVFGQGTKLEIK

SEQ ID NO: 1230 - protein, 238 aa, synthetic construct
EVQLVESGGGLVQPGGSLRLSCAASGFTFSRTGMHWVRQAPGKGLEWVSYISSWSSTIYYADTLKGRFTISRDNSKNTLYLQMNSLRAEDTAVYYCARRGEGAMDYWGQGTTVTVSSGGGGSGGGGSGGGGSDNQLTQSPSFLSASVGDRVTITCRASSSVNYAYWYQQKPGKAPKLLIYYTSNLAPGVPSRFSGSGSGNEYTLTISSLQPEDFATYYCQQFTSSPFVFGQGTKLEIK

SEQ ID NO: 1231 - protein, 238 aa, synthetic construct
EVQLVESGGGLVQPGGSLRLSCAASGFTFSRKGMHWVRQAPGKGLEWVSYISSWSSTIYYADTLKGRFTISRDNSKNTLYLQMNSLRAEDTAVYYCARRGAGAMDYWGQGTTVTVSSGGGGSGGGGSGGGGSDNQLTQSPSFLSASVGDRVTITCRASKSVNYIYWYQQKPGKAPKLLIYYTSNLAPGVPSRFSGSGSGNEYTLTISSLQPEDFATYYCQQFTSSPFVFGQGTKLEIK

SEQ ID NO: 1232 - protein, 238 aa, synthetic construct
EVQLVESGGGLVQPGGSLRLSCAASGFTFSNFGMHWVRQAPGKGLEWVSYISSWSSTIYYADTLKGRFTISRDNSKNTLYLQMNSLRAEDTAVYYCARRGAGAMDYWGQGTTVTVSSGGGGSGGGGSGGGGSDNQLTQSPSFLSASVGDRVTITCRASKSVNYIYWYQQKPGKAPKLLIYYTSNLAPGVPSRFSGSGSGNEYTLTISSLQPEDFATYYCQQFTSSPFVFGQGTKLEIK

SEQ ID NO: 1233 - protein, 238 aa, synthetic construct
EVQLVESGGGLVQPGGSLRLSCAASGFTFSNTGMHWVRQAPGKGLEWVSYISSTSSTILYADTLKGRFTISRDNSKNTLYLQMNSLRAEDTAVYYCARRGEGAMDYWGQGTTVTVSSGGGGSGGGGSGGGGSDNQLTQSPSFLSASVGDRVTITCRASRSVNYAYWYQQKPGKAPKLLIYYTSNLAPGVPSRFSGSGSGNEYTLTISSLQPEDFATYYCQQFTSSPFVFGQGTKLEIK

SEQ ID NO: 1234 - protein, 238 aa, synthetic construct
EVQLVESGGGLVQPGGSLRLSCAASGFTFSNTGMHWVRQAPGKGLEWVSYISSSSSTILYADTLKGRFTISRDNSKNTLYLQMNSLRAEDTAVYYCARRGAGAMDYWGQGTTVTVSSGGGGSGGGGSGGGGSDNQLTQSPSFLSASVGDRVTITCRASRSVNYAYWYQQKPGKAPKLLIYYTSNLAPGVPSRFSGSGSGNEYTLTISSLQPEDFATYYCQQFTSSPFVFGQGTKLEIK

SEQ ID NO: 1235 - protein, 238 aa, synthetic construct
EVQLVESGGGLVQPGGSLRLSCAASGFTFSRTGMHWVRQAPGKGLEWVSYISSWSSTILYADTLKGRFTISRDNSKNTLYLQMNSLRAEDTAVYYCARRGAGAMDYWGQGTTVTVSSGGGGSGGGGSGGGGSDNQLTQSPSFLSASVGDRVTITCRASRSVNYAYWYQQKPGKAPKLLIYYTSNLAPGVPSRFSGSGSGNEYTLTISSLQPEDFATYYCQQFTSSPFVFGQGTKLEIK

SEQ ID NO: 1236 - protein, 238 aa, synthetic construct
EVQLVESGGGLVQPGGSLRLSCAASGFTFSNKGMHWVRQAPGKGLEWVSYISSWSSTILYADTLKGRFTISRDNSKNTLYLQMNSLRAEDTAVYYCARRGAGAMDYWGQGTTVTVSSGGGGSGGGGSGGGGSDNQLTQSPSFLSASVGDRVTITCRASSSVNYAYWYQQKPGKAPKLLIYYTSNLAPGVPSRFSGSGSGNEYTLTISSLQPEDFATYYCQQFTSSPFTFGQGTKLEIK

SEQ ID NO: 1237 - protein, 238 aa, synthetic construct
EVQLVESGGGLVQPGGSLRLSCAASGFTFSNKGMHWVRQAPGKGLEWVSYISSGSSTILYADTLKGRFTISRDNSKNTLYLQMNSLRAEDTAVYYCARRGAGAMDYWGQGTTVTVSSGGGGSGGGGSGGGGSDNQLTQSPSFLSASVGDRVTITCRASRSVNYAYWYQQKPGKAPKLLIYYTSNLAPGVPSRFSGSGSGNEYTLTISSLQPEDFATYYCQQFTSSPFVFGQGTKLEIK

SEQ ID NO: 1238 - protein, 238 aa, synthetic construct
EVQLVESGGGLVQPGGSLRLSCAASGFTFSRTGMHWVRQAPGKGLEWVSYISSSSSTILYADTLKGRFTISRDNSKNTLYLQMNSLRAEDTAVYYCARRGEGAMDYWGQGTTVTVSSGGGGSGGGGSGGGGSDNQLTQSPSFLSASVGDRVTITCRASKSVNYAYWYQQKPGKAPKLLIYYTSNLAPGVPSRFSGSGSGNEYTLTISSLQPEDFATYYCQQFTSSPFVFGQGTKLEIK

SEQ ID NO: 1239 - protein, 238 aa, synthetic construct
EVQLVESGGGLVQPGGSLRLSCAASGFTFSNTGMHWVRQAPGKGLEWVSYISSSSSTIYYADTLKGRFTISRDNSKNTLYLQMNSLRAEDTAVYYCARRGAGAMDYWGQGTTVTVSSGGGGSGGGGSGGGGSDNQLTQSPSFLSASVGDRVTITCRASRSVNYAYWYQQKPGKAPKLLIYYTSNLAPGVPSRFSGSGSGNEYTLTISSLQPEDFATYYCQQFTSSPFVFGQGTKLEIK

SEQ ID NO: 1240 - protein, 238 aa, synthetic construct
EVQLVESGGGLVQPGGSLRLSCAASGFTFSITGMHWVRQAPGKGLEWVSYISSSSSTILYADTLKGRFTISRDNSKNTLYLQMNSLRAEDTAVYYCARRGEGAMDYWGQGTTVTVSSGGGGSGGGGSGGGGSDNQLTQSPSFLSASVGDRVTITCRASRSVNYIYWYQQKPGKAPKLLIYYTSNLAPGVPSRFSGSGSGNEYTLTISSLQPEDFATYYCQQFTSSPFVFGQGTKLEIK

SEQ ID NO: 1241 - protein, 238 aa, synthetic construct
EVQLVESGGGLVQPGGSLRLSCAASGFTFSIFGMHWVRQAPGKCLEWVSYISSTSSTILYADTLKGRFTISRDNSKNTLYLQMNSLRAEDTAVYYCARRGEGAMDYWGQGTTVTVSSGGGGSGGGGSGGGGSDNQLTQSPSFLSASVGDRVTITCRASRSVNYAYWYQQKPGKAPKLLIYYTSNLAPGVPSRFSGSGSGNEYTLTISSLQPEDFATYYCQQFTSSPFVFGCGTKLEIK

SEQ ID NO: 1242 - protein, 238 aa, synthetic construct
EVQLVESGGGLVQPGGSLRLSCAASGFTFSIFGMHWVRQAPGKCLEWVSYISSTSSTILYADTLKGRFTISRDNSKNTLYLQMNSLRAEDTAVYYCARRGEGAMDYWGQGTTVTVSSGGGGSGGGGSGGGGSDNQLTQSPSFLSASVGDRVTITCRASSSVNYAYWYQQKPGKAPKLLIYYTSNLAPGVPSRFSGSGSGNEYTLTISSLQPEDFATYYCQQFTSSPFVFGCGTKLEIK

SEQ ID NO: 1243 - protein, 238 aa, synthetic construct
EVQLVESGGGLVQPGGSLRLSCAASGFTFSRTGMHWVRQAPGKCLEWVSYISSSSSTILYADTLKGRFTISRDNSKNTLYLQMNSLRAEDTAVYYCARRGEGAMDYWGQGTTVTVSSGGGGSGGGGSGGGGSDNQLTQSPSFLSASVGDRVTITCRASRSVNYAYWYQQKPGKAPKLLIYYTSNLAPGVPSRFSGSGSGNEYTLTISSLQPEDFATYYCQQFTSSPFVFGCGTKLEIK

SEQ ID NO: 1244 - protein, 238 aa, synthetic construct
EVQLVESGGGLVQPGGSLRLSCAASGFTFSIKGMHWVRQAPGKCLEWVSYISSGSSTIYYADTLKGRFTISRDNSKNTLYLQMNSLRAEDTAVYYCARRGAGAMDYWGQGTTVTVSSGGGGSGGGGSGGGGSDNQLTQSPSFLSASVGDRVTITCRASKSVNYAYWYQQKPGKAPKLLIYYTSNLAPGVPSRFSGSGSGNEYTLTISSLQPEDFATYYCQQFTSSPFVFGCGTKLEIK

SEQ ID NO: 1245 - protein, 238 aa, synthetic construct
EVQLVESGGGLVQPGGSLRLSCAASGFTFSNKGMHWVRQAPGKCLEWVSYISSSSSTIYYADTLKGRFTISRDNSKNTLYLQMNSLRAEDTAVYYCARRGEGAMDYWGQGTTVTVSSGGGGSGGGGSGGGGSDNQLTQSPSFLSASVGDRVTITCRASKSVNYIYWYQQKPGKAPKLLIYYTSNLAPGVPSRFSGSGSGNEYTLTISSLQPEDFATYYCQQFTSSPFTFGCGTKLEIK

SEQ ID NO: 1246 - protein, 238 aa, synthetic construct
EVQLVESGGGLVQPGGSLRLSCAASGFTFSLFGMHWVRQAPGKCLEWVSYISSWSSTILYADTLKGRFTISRDNSKNTLYLQMNSLRAEDTAVYYCARRGAGAMDYWGQGTTVTVSSGGGGSGGGGSGGGGSDNQLTQSPSFLSASVGDRVTITCRASSSVNYAYWYQQKPGKAPKLLIYYTSNLAPGVPSRFSGSGSGNEYTLTISSLQPEDFATYYCQQFTSSPFVFGCGTKLEIK

SEQ ID NO: 1247 - protein, 238 aa, synthetic construct
EVQLVESGGGLVQPGGSLRLSCAASGFTFSIFGMHWVRQAPGKCLEWVSYISSWSSTIYYADTLKGRFTISRDNSKNTLYLQMNSLRAEDTAVYYCARRGEGAMDYWGQGTTVTVSSGGGGSGGGGSGGGGSDNQLTQSPSFLSASVGDRVTITCRASRSVNYAYWYQQKPGKAPKLLIYYTSNLAPGVPSRFSGSGSGNEYTLTISSLQPEDFATYYCQQFTSSPFTFGCGTKLEIK

SEQ ID NO: 1248 - protein, 238 aa, synthetic construct
EVQLVESGGGLVQPGGSLRLSCAASGFTFSRFGMHWVRQAPGKCLEWVSYISSWSSTILYADTLKGRFTISRDNSKNTLYLQMNSLRAEDTAVYYCARRGEGAMDYWGQGTTVTVSSGGGGSGGGGSGGGGSDNQLTQSPSFLSASVGDRVTITCRASKSVNYIYWYQQKPGKAPKLLIYYTSNLAPGVPSRFSGSGSGNEYTLTISSLQPEDFATYYCQQFTSSPFVFGCGTKLEIK

SEQ ID NO: 1249 - protein, 238 aa, synthetic construct
EVQLVESGGGLVQPGGSLRLSCAASGFTFSRKGMHWVRQAPGKCLEWVSYISSTSSTILYADTLKGRFTISRDNSKNTLYLQMNSLRAEDTAVYYCARRGEGAMDYWGQGTTVTVSSGGGGSGGGGSGGGGSDNQLTQSPSFLSASVGDRVTITCRASRSVNYIYWYQQKPGKAPKLLIYYTSNLAPGVPSRFSGSGSGNEYTLTISSLQPEDFATYYCQQFTSSPFVFGCGTKLEIK

SEQ ID NO: 1250 - protein, 238 aa, synthetic construct
EVQLVESGGGLVQPGGSLRLSCAASGFTFSIFGMHWVRQAPGKCLEWVSYISSWSSTIYYADTLKGRFTISRDNSKNTLYLQMNSLRAEDTAVYYCARRGAGAMDYWGQGTTVTVSSGGGGSGGGGSGGGGSDNQLTQSPSFLSASVGDRVTITCRASSSVNYAYWYQQKPGKAPKLLIYYTSNLAPGVPSRFSGSGSGNEYTLTISSLQPEDFATYYCQQFTSSPFVFGCGTKLEIK

SEQ ID NO: 1251 - protein, 238 aa, synthetic construct
EVQLVESGGGLVQPGGSLRLSCAASGFTFSIFGMHWVRQAPGKCLEWVSYISSSSSTILYADTLKGRFTISRDNSKNTLYLQMNSLRAEDTAVYYCARRGAGAMDYWGQGTTVTVSSGGGGSGGGGSGGGGSDNQLTQSPSFLSASVGDRVTITCRASSSVNYAYWYQQKPGKAPKLLIYYTSNLAPGVPSRFSGSGSGNEYTLTISSLQPEDFATYYCQQFTSSPFVFGCGTKLEIK

SEQ ID NO: 1252 - protein, 238 aa, synthetic construct
EVQLVESGGGLVQPGGSLRLSCAASGFTFSNKGMHWVRQAPGKCLEWVSYISSSSSTILYADTLKGRFTISRDNSKNTLYLQMNSLRAEDTAVYYCARRGAGAMDYWGQGTTVTVSSGGGGSGGGGSGGGGSDNQLTQSPSFLSASVGDRVTITCRASSSVNYAYWYQQKPGKAPKLLIYYTSNLAPGVPSRFSGSGSGNEYTLTISSLQPEDFATYYCQQFTSSPFTFGCGTKLEIK

SEQ ID NO: 1253 - protein, 238 aa, synthetic construct
EVQLVESGGGLVQPGGSLRLSCAASGFTFSRFGMHWVRQAPGKCLEWVSYISSTSSTIYYADTLKGRFTISRDNSKNTLYLQMNSLRAEDTAVYYCARRGEGAMDYWGQGTTVTVSSGGGGSGGGGSGGGGSDNQLTQSPSFLSASVGDRVTITCRASRSVNYAYWYQQKPGKAPKLLIYYTSNLAPGVPSRFSGSGSGNEYTLTISSLQPEDFATYYCQQFTSSPFTFGCGTKLEIK

SEQ ID NO: 1254 - protein, 238 aa, synthetic construct
EVQLVESGGGLVQPGGSLRLSCAASGFTFSITGMHWVRQAPGKCLEWVSYISSWSSTIYYADTLKGRFTISRDNSKNTLYLQMNSLRAEDTAVYYCARRGAGAMDYWGQGTTVTVSSGGGGSGGGGSGGGGSDNQLTQSPSFLSASVGDRVTITCRASKSVNYIYWYQQKPGKAPKLLIYYTSNLAPGVPSRFSGSGSGNEYTLTISSLQPEDFATYYCQQFTSSPFVFGCGTKLEIK

SEQ ID NO: 1255 - protein, 238 aa, synthetic construct
EVQLVESGGGLVQPGGSLRLSCAASGFTFSRKGMHWVRQAPGKCLEWVSYISSGSSTIYYADTLKGRFTISRDNSKNTLYLQMNSLRAEDTAVYYCARRGAGAMDYWGQGTTVTVSSGGGGSGGGGSGGGGSDNQLTQSPSFLSASVGDRVTITCRASSSVNYAYWYQQKPGKAPKLLIYYTSNLAPGVPSRFSGSGSGNEYTLTISSLQPEDFATYYCQQFTSSPFTFGCGTKLEIK

SEQ ID NO: 1256 - protein, 238 aa, synthetic construct
EVQLVESGGGLVQPGGSLRLSCAASGFTFSITGMHWVRQAPGKCLEWVSYISSTSSTILYADTLKGRFTISRDNSKNTLYLQMNSLRAEDTAVYYCARRGEGAMDYWGQGTTVTVSSGGGGSGGGGSGGGGSDNQLTQSPSFLSASVGDRVTITCRASKSVNYIYWYQQKPGKAPKLLIYYTSNLAPGVPSRFSGSGSGNEYTLTISSLQPEDFATYYCQQFTSSPFTFGCGTKLEIK

SEQ ID NO: 1257 - protein, 238 aa, synthetic construct
EVQLVESGGGLVQPGGSLRLSCAASGFTFSIKGMHWVRQAPGKCLEWVSYISSSSSTILYADTLKGRFTISRDNSKNTLYLQMNSLRAEDTAVYYCARRGAGAMDYWGQGTTVTVSSGGGGSGGGGSGGGGSDNQLTQSPSFLSASVGDRVTITCRASKSVNYIYWYQQKPGKAPKLLIYYTSNLAPGVPSRFSGSGSGNEYTLTISSLQPEDFATYYCQQFTSSPFVFGCGTKLEIK

SEQ ID NO: 1258 - protein, 238 aa, synthetic construct
EVQLVESGGGLVQPGGSLRLSCAASGFTFSRKGMHWVRQAPGKCLEWVSYISSWSSTIYYADTLKGRFTISRDNSKNTLYLQMNSLRAEDTAVYYCARRGAGAMDYWGQGTTVTVSSGGGGSGGGGSGGGGSDNQLTQSPSFLSASVGDRVTITCRASSSVNYAYWYQQKPGKAPKLLIYYTSNLAPGVPSRFSGSGSGNEYTLTISSLQPEDFATYYCQQFTSSPFTFGCGTKLEIK

SEQ ID NO: 1259 - protein, 238 aa, synthetic construct
EVQLVESGGGLVQPGGSLRLSCAASGFTFSIFGMHWVRQAPGKCLEWVSYISSTSSTILYADTLKGRFTISRDNSKNTLYLQMNSLRAEDTAVYYCARRGEGAMDYWGQGTTVTVSSGGGGSGGGGSGGGGSDNQLTQSPSFLSASVGDRVTITCRASRSVNYAYWYQQKPGKAPKLLIYYTSNLAPGVPSRFSGSGSGNEYTLTISSLQPEDFATYYCQQFTSSPFTFGCGTKLEIK

SEQ ID NO: 1260 - protein, 238 aa, synthetic construct
EVQLVESGGGLVQPGGSLRLSCAASGFTFSIYGMHWVRQAPGKCLEWVSYISSTSSTILYADTLKGRFTISRDNSKNTLYLQMNSLRAEDTAVYYCARRGAGAMDYWGQGTTVTVSSGGGGSGGGGSGGGGSDNQLTQSPSFLSASVGDRVTITCRASSSVNYAYWYQQKPGKAPKLLIYYTSNLAPGVPSRFSGSGSGNEYTLTISSLQPEDFATYYCQQFTSSPFTFGCGTKLEIK

SEQ ID NO: 1261 - protein, 238 aa, synthetic construct
EVQLVESGGGLVQPGGSLRLSCAASGFTFSRTGMHWVRQAPGKCLEWVSYISSGSSTILYADTLKGRFTISRDNSKNTLYLQMNSLRAEDTAVYYCARRGEGAMDYWGQGTTVTVSSGGGGSGGGGSGGGGSDNQLTQSPSFLSASVGDRVTITCRASKSVNYAYWYQQKPGKAPKLLIYYTSNLAPGVPSRFSGSGSGNEYTLTISSLQPEDFATYYCQQFTSSPFVFGCGTKLEIK

SEQ ID NO: 1262 - protein, 238 aa, synthetic construct
EVQLVESGGGLVQPGGSLRLSCAASGFTFSNTGMHWVRQAPGKCLEWVSYISSTSSTILYADTLKGRFTISRDNSKNTLYLQMNSLRAEDTAVYYCARRGAGAMDYWGQGTTVTVSSGGGGSGGGGSGGGGSDNQLTQSPSFLSASVGDRVTITCRASRSVNYAYWYQQKPGKAPKLLIYYTSNLAPGVPSRFSGSGSGNEYTLTISSLQPEDFATYYCQQFTSSPFTFGCGTKLEIK

SEQ ID NO: 1263 - protein, 238 aa, synthetic construct
EVQLVESGGGLVQPGGSLRLSCAASGFTFSNKGMHWVRQAPGKCLEWVSYISSGSSTILYADTLKGRFTISRDNSKNTLYLQMNSLRAEDTAVYYCARRGEGAMDYWGQGTTVTVSSGGGGSGGGGSGGGGSDNQLTQSPSFLSASVGDRVTITCRASKSVNYAYWYQQKPGKAPKLLIYYTSNLAPGVPSRFSGSGSGNEYTLTISSLQPEDFATYYCQQFTSSPFTFGCGTKLEIK

SEQ ID NO: 1264 - protein, 238 aa, synthetic construct
EVQLVESGGGLVQPGGSLRLSCAASGFTFSITGMHWVRQAPGKCLEWVSYISSTSSTILYADTLKGRFTISRDNSKNTLYLQMNSLRAEDTAVYYCARRGAGAMDYWGQGTTVTVSSGGGGSGGGGSGGGGSDNQLTQSPSFLSASVGDRVTITCRASRSVNYIYWYQQKPGKAPKLLIYYTSNLAPGVPSRFSGSGSGNEYTLTISSLQPEDFATYYCQQFTSSPFVFGCGTKLEIK

SEQ ID NO: 1265 - protein, 238 aa, synthetic construct
EVQLVESGGGLVQPGGSLRLSCAASGFTFSRFGMHWVRQAPGKCLEWVSYISSTSSTIYYADTLKGRFTISRDNSKNTLYLQMNSLRAEDTAVYYCARRGEGAMDYWGQGTTVTVSSGGGGSGGGGSGGGGSDNQLTQSPSFLSASVGDRVTITCRASRSVNYAYWYQQKPGKAPKLLIYYTSNLAPGVPSRFSGSGSGNEYTLTISSLQPEDFATYYCQQFTSSPFVFGCGTKLEIK

SEQ ID NO: 1266 - protein, 238 aa, synthetic construct
EVQLVESGGGLVQPGGSLRLSCAASGFTFSITGMHWVRQAPGKCLEWVSYISSSSSTIYYADTLKGRFTISRDNSKNTLYLQMNSLRAEDTAVYYCARRGAGAMDYWGQGTTVTVSSGGGGSGGGGSGGGGSDNQLTQSPSFLSASVGDRVTITCRASKSVNYAYWYQQKPGKAPKLLIYYTSNLAPGVPSRFSGSGSGNEYTLTISSLQPEDFATYYCQQFTSSPFVFGCGTKLEIK

SEQ ID NO: 1267 - protein, 238 aa, synthetic construct
EVQLVESGGGLVQPGGSLRLSCAASGFTFSRTGMHWVRQAPGKCLEWVSYISSWSSTIYYADTLKGRFTISRDNSKNTLYLQMNSLRAEDTAVYYCARRGEGAMDYWGQGTTVTVSSGGGGSGGGGSGGGGSDNQLTQSPSFLSASVGDRVTITCRASSSVNYAYWYQQKPGKAPKLLIYYTSNLAPGVPSRFSGSGSGNEYTLTISSLQPEDFATYYCQQFTSSPFVFGCGTKLEIK

SEQ ID NO: 1268 - protein, 238 aa, synthetic construct
EVQLVESGGGLVQPGGSLRLSCAASGFTFSRKGMHWVRQAPGKCLEWVSYISSWSSTIYYADTLKGRFTISRDNSKNTLYLQMNSLRAEDTAVYYCARRGAGAMDYWGQGTTVTVSSGGGGSGGGGSGGGGSDNQLTQSPSFLSASVGDRVTITCRASKSVNYIYWYQQKPGKAPKLLIYYTSNLAPGVPSRFSGSGSGNEYTLTISSLQPEDFATYYCQQFTSSPFVFGCGTKLEIK

SEQ ID NO: 1269 - protein, 238 aa, synthetic construct
EVQLVESGGGLVQPGGSLRLSCAASGFTFSNFGMHWVRQAPGKCLEWVSYISSWSSTIYYADTLKGRFTISRDNSKNTLYLQMNSLRAEDTAVYYCARRGAGAMDYWGQGTTVTVSSGGGGSGGGGSGGGGSDNQLTQSPSFLSASVGDRVTITCRASKSVNYIYWYQQKPGKAPKLLIYYTSNLAPGVPSRFSGSGSGNEYTLTISSLQPEDFATYYCQQFTSSPFVFGCGTKLEIK

SEQ ID NO: 1270 - protein, 238 aa, synthetic construct
EVQLVESGGGLVQPGGSLRLSCAASGFTFSNTGMHWVRQAPGKCLEWVSYISSTSSTILYADTLKGRFTISRDNSKNTLYLQMNSLRAEDTAVYYCARRGEGAMDYWGQGTTVTVSSGGGGSGGGGSGGGGSDNQLTQSPSFLSASVGDRVTITCRASRSVNYAYWYQQKPGKAPKLLIYYTSNLAPGVPSRFSGSGSGNEYTLTISSLQPEDFATYYCQQFTSSPFVFGCGTKLEIK

SEQ ID NO: 1271 - protein, 238 aa, synthetic construct
EVQLVESGGGLVQPGGSLRLSCAASGFTFSNTGMHWVRQAPGKCLEWVSYISSSSSTILYADTLKGRFTISRDNSKNTLYLQMNSLRAEDTAVYYCARRGAGAMDYWGQGTTVTVSSGGGGSGGGGSGGGGSDNQLTQSPSFLSASVGDRVTITCRASRSVNYAYWYQQKPGKAPKLLIYYTSNLAPGVPSRFSGSGSGNEYTLTISSLQPEDFATYYCQQFTSSPFVFGCGTKLEIK

SEQ ID NO: 1272 - protein, 238 aa, synthetic construct
EVQLVESGGGLVQPGGSLRLSCAASGFTFSRTGMHWVRQAPGKCLEWVSYISSWSSTILYADTLKGRFTISRDNSKNTLYLQMNSLRAEDTAVYYCARRGAGAMDYWGQGTTVTVSSGGGGSGGGGSGGGGSDNQLTQSPSFLSASVGDRVTITCRASRSVNYAYWYQQKPGKAPKLLIYYTSNLAPGVPSRFSGSGSGNEYTLTISSLQPEDFATYYCQQFTSSPFVFGCGTKLEIK

SEQ ID NO: 1273 - protein, 238 aa, synthetic construct
EVQLVESGGGLVQPGGSLRLSCAASGFTFSNKGMHWVRQAPGKCLEWVSYISSWSSTILYADTLKGRFTISRDNSKNTLYLQMNSLRAEDTAVYYCARRGAGAMDYWGQGTTVTVSSGGGGSGGGGSGGGGSDNQLTQSPSFLSASVGDRVTITCRASSSVNYAYWYQQKPGKAPKLLIYYTSNLAPGVPSRFSGSGSGNEYTLTISSLQPEDFATYYCQQFTSSPFTFGCGTKLEIK

SEQ ID NO: 1274 - protein, 238 aa, synthetic construct
EVQLVESGGGLVQPGGSLRLSCAASGFTFSNKGMHWVRQAPGKCLEWVSYISSGSSTILYADTLKGRFTISRDNSKNTLYLQMNSLRAEDTAVYYCARRGAGAMDYWGQGTTVTVSSGGGGSGGGGSGGGGSDNQLTQSPSFLSASVGDRVTITCRASRSVNYAYWYQQKPGKAPKLLIYYTSNLAPGVPSRFSGSGSGNEYTLTISSLQPEDFATYYCQQFTSSPFVFGCGTKLEIK

SEQ ID NO: 1275 - protein, 238 aa, synthetic construct
EVQLVESGGGLVQPGGSLRLSCAASGFTFSRTGMHWVRQAPGKCLEWVSYISSSSSTILYADTLKGRFTISRDNSKNTLYLQMNSLRAEDTAVYYCARRGEGAMDYWGQGTTVTVSSGGGGSGGGGSGGGGSDNQLTQSPSFLSASVGDRVTITCRASKSVNYAYWYQQKPGKAPKLLIYYTSNLAPGVPSRFSGSGSGNEYTLTISSLQPEDFATYYCQQFTSSPFVFGCGTKLEIK

SEQ ID NO: 1276 - protein, 238 aa, synthetic construct
EVQLVESGGGLVQPGGSLRLSCAASGFTFSNTGMHWVRQAPGKCLEWVSYISSSSSTIYYADTLKGRFTISRDNSKNTLYLQMNSLRAEDTAVYYCARRGAGAMDYWGQGTTVTVSSGGGGSGGGGSGGGGSDNQLTQSPSFLSASVGDRVTITCRASRSVNYAYWYQQKPGKAPKLLIYYTSNLAPGVPSRFSGSGSGNEYTLTISSLQPEDFATYYCQQFTSSPFVFGCGTKLEIK

SEQ ID NO: 1277 - protein, 238 aa, synthetic construct
EVQLVESGGGLVQPGGSLRLSCAASGFTFSITGMHWVRQAPGKCLEWVSYISSSSSTILYADTLKGRFTISRDNSKNTLYLQMNSLRAEDTAVYYCARRGEGAMDYWGQGTTVTVSSGGGGSGGGGSGGGGSDNQLTQSPSFLSASVGDRVTITCRASRSVNYIYWYQQKPGKAPKLLIYYTSNLAPGVPSRFSGSGSGNEYTLTISSLQPEDFATYYCQQFTSSPFVFGCGTKLEIK

SEQ ID NO: 1278 - protein, 220 aa, synthetic construct
EVQLVESGGGLVQPGGSLRLSCAASGFTFSNFGMHWVRQAPGKGLEWVSYISSGSSTIYYADTLKGRFTISRDNSKNTLYLQMNSLRAEDTAVYYCARRGEGAMDYWGQGTTVTVSSASTKGPSVFPLAPSSKSTSGGTAALGCLVKDYFPEPVTVSWNSGALTSGVHTFPAVLQSSGLYSLSSVVTVPSSSLGTQTYICNVNHKPSNTKVDKKVEPKSC

SEQ ID NO: 1279 - protein, 220 aa, synthetic construct
EVQLVESGGGLVQPGGSLRLSCAASGFTFSNFGMHWVRQAPGKGLEWVSYISSGSSTIYYADTLKGRFTISRDNSKNTLYLQMNSLRAEDTAVYYCARRGEGAMDYWGQGTLVTVSSASTKGPSVFPLAPSSKSTSGGTAALGCLVKDYFPEPVTVSWNSGALTSGVHTFPAVLQSSGLYSLSSVVTVPSSSLGTQTYICNVNHKPSNTKVDKKVEPKSC

SEQ ID NO: 1280 - protein, 213 aa, synthetic construct
DNQLTQSPSFLSASVGDRVTITCRASSSVNYIYWYQQKPGKAPKLLIYYTSNLAPGVPSRFSGSGSGNEYTLTISSLQPEDFATYYCQQFTSSPFTFGQGTKLEIKRTVAAPSVFIFPPSDEQLKSGTASVVCLLNNFYPREAKVQWKVDNALQSGNSQESVTEQDSKDSTYSLSSTLTLSKADYEKHKVYACEVTHQGLSSPVTKSFNRGEC

SEQ ID NO: 1281 - protein, 213 aa, synthetic construct
DIQLTQSPSFLSASVGDRVTITCRASSSVNYIYWYQQKPGKAPKLLIYYTSNLAPGVPSRFSGSGSGTEFTLTISSLQPEDFATYYCQQYTSSPFTFGQGTKLEIKRTVAAPSVFIFPPSDEQLKSGTASVVCLLNNFYPREAKVQWKVDNALQSGNSQESVTEQDSKDSTYSLSSTLTLSKADYEKHKVYACEVTHQGLSSPVTKSFNRGEC

SEQ ID NO: 1282 - protein, 213 aa, synthetic construct
DIQLTQSPSFLSASVGDRVTITCRASQSVNYIYWYQQKPGKAPKLLIYYTSNLAPGVPSRFSGSGSGTEFTLTISSLQPEDFATYYCQQYTSSPFTFGQGTKLEIKRTVAAPSVFIFPPSDEQLKSGTASVVCLLNNFYPREAKVQWKVDNALQSGNSQESVTEQDSKDSTYSLSSTLTLSKADYEKHKVYACEVTHQGLSSPVTKSFNRGEC

SEQ ID NO: 1283 - protein, 213 aa, synthetic construct
DIQLTQSPSFLSASVGDRVTITCRASQSVNYLYWYQQKPGKAPKLLIYYTSNLAPGVPSRFSGSGSGTEFTLTISSLQPEDFATYYCQQYTSSPFTFGQGTKLEIKRTVAAPSVFIFPPSDEQLKSGTASVVCLLNNFYPREAKVQWKVDNALQSGNSQESVTEQDSKDSTYSLSSTLTLSKADYEKHKVYACEVTHQGLSSPVTKSFNRGEC

SEQ ID NO: 1284 - protein, 213 aa, synthetic construct
DNQLTQSPSFLSASVGDRVTITCRASRSVNYAYWYQQKPGKAPKLLIYYTSNLAPGVPSRFSGSGSGNEYTLTISSLQPEDFATYYCQQFTSSPFVFGQGTKLEIKRTVAAPSVFIFPPSDEQLKSGTASVVCLLNNFYPREAKVQWKVDNALQSGNSQESVTEQDSKDSTYSLSSTLTLSKADYEKHKVYACEVTHQGLSSPVTKSFNRGEC

SEQ ID NO: 1285 - protein, 213 aa, synthetic construct
DNQLTQSPSFLSASVGDRVTITCRASSSVNYAYWYQQKPGKAPKLLIYYTSNLAPGVPSRFSGSGSGNEYTLTISSLQPEDFATYYCQQFTSSPFVFGQGTKLEIKRTVAAPSVFIFPPSDEQLKSGTASVVCLLNNFYPREAKVQWKVDNALQSGNSQESVTEQDSKDSTYSLSSTLTLSKADYEKHKVYACEVTHQGLSSPVTKSFNRGEC

SEQ ID NO: 1286 - protein, 213 aa, synthetic construct
DNQLTQSPSFLSASVGDRVTITCRASKSVNYAYWYQQKPGKAPKLLIYYTSNLAPGVPSRFSGSGSGNEYTLTISSLQPEDFATYYCQQFTSSPFVFGQGTKLEIKRTVAAPSVFIFPPSDEQLKSGTASVVCLLNNFYPREAKVQWKVDNALQSGNSQESVTEQDSKDSTYSLSSTLTLSKADYEKHKVYACEVTHQGLSSPVTKSFNRGEC

SEQ ID NO: 1287 - protein, 213 aa, synthetic construct
DNQLTQSPSFLSASVGDRVTITCRASKSVNYIYWYQQKPGKAPKLLIYYTSNLAPGVPSRFSGSGSGNEYTLTISSLQPEDFATYYCQQFTSSPFTFGQGTKLEIKRTVAAPSVFIFPPSDEQLKSGTASVVCLLNNFYPREAKVQWKVDNALQSGNSQESVTEQDSKDSTYSLSSTLTLSKADYEKHKVYACEVTHQGLSSPVTKSFNRGEC

SEQ ID NO: 1288 - protein, 213 aa, synthetic construct
DNQLTQSPSFLSASVGDRVTITCRASRSVNYAYWYQQKPGKAPKLLIYYTSNLAPGVPSRFSGSGSGNEYTLTISSLQPEDFATYYCQQFTSSPFTFGQGTKLEIKRTVAAPSVFIFPPSDEQLKSGTASVVCLLNNFYPREAKVQWKVDNALQSGNSQESVTEQDSKDSTYSLSSTLTLSKADYEKHKVYACEVTHQGLSSPVTKSFNRGEC

SEQ ID NO: 1289 - protein, 213 aa, synthetic construct
DNQLTQSPSFLSASVGDRVTITCRASKSVNYIYWYQQKPGKAPKLLIYYTSNLAPGVPSRFSGSGSGNEYTLTISSLQPEDFATYYCQQFTSSPFVFGQGTKLEIKRTVAAPSVFIFPPSDEQLKSGTASVVCLLNNFYPREAKVQWKVDNALQSGNSQESVTEQDSKDSTYSLSSTLTLSKADYEKHKVYACEVTHQGLSSPVTKSFNRGEC

SEQ ID NO: 1290 - protein, 213 aa, synthetic construct
DNQLTQSPSFLSASVGDRVTITCRASRSVNYIYWYQQKPGKAPKLLIYYTSNLAPGVPSRFSGSGSGNEYTLTISSLQPEDFATYYCQQFTSSPFVFGQGTKLEIKRTVAAPSVFIFPPSDEQLKSGTASVVCLLNNFYPREAKVQWKVDNALQSGNSQESVTEQDSKDSTYSLSSTLTLSKADYEKHKVYACEVTHQGLSSPVTKSFNRGEC

SEQ ID NO: 1291 - protein, 213 aa, synthetic construct
DNQLTQSPSFLSASVGDRVTITCRASSSVNYAYWYQQKPGKAPKLLIYYTSNLAPGVPSRFSGSGSGNEYTLTISSLQPEDFATYYCQQFTSSPFTFGQGTKLEIKRTVAAPSVFIFPPSDEQLKSGTASVVCLLNNFYPREAKVQWKVDNALQSGNSQESVTEQDSKDSTYSLSSTLTLSKADYEKHKVYACEVTHQGLSSPVTKSFNRGEC

SEQ ID NO: 1292 - protein, 213 aa, synthetic construct
DNQLTQSPSFLSASVGDRVTITCRASKSVNYAYWYQQKPGKAPKLLIYYTSNLAPGVPSRFSGSGSGNEYTLTISSLQPEDFATYYCQQFTSSPFTFGQGTKLEIKRTVAAPSVFIFPPSDEQLKSGTASVVCLLNNFYPREAKVQWKVDNALQSGNSQESVTEQDSKDSTYSLSSTLTLSKADYEKHKVYACEVTHQGLSSPVTKSFNRGEC

SEQ ID NO: 1293-1294 - skipped (2 entries)

SEQ ID NO: 1295 - protein, 220 aa, synthetic construct
EVQLVESGGGLVQPGGSLRLSCAASGFTFSNYGMHWVRQAPGKGLEWVSYISSGSSTIYYADALKGRFTISRDNSKNTLYLQMNSLRAEDTAVYYCARRGEGAMDYWGQGTLVTVSSASTKGPSVFPLAPSSKSTSGGTAALGCLVKDYFPEPVTVSWNSGALTSGVHTFPAVLQSSGLYSLSSVVTVPSSSLGTQTYICNVNHKPSNTKVDKKVEPKSC

SEQ ID NO: 1296 - protein, 220 aa, synthetic construct
EVQLVESGGGLVQPGGSLRLSCAASGFTFSIFGMHWVRQAPGKGLEWVSYISSTSSTILYADTLKGRFTISRDNSKNTLYLQMNSLRAEDTAVYYCARRGEGAMDYWGQGTTVTVSSASTKGPSVFPLAPSSKSTSGGTAALGCLVKDYFPEPVTVSWNSGALTSGVHTFPAVLQSSGLYSLSSVVTVPSSSLGTQTYICNVNHKPSNTKVDKKVEPKSC

SEQ ID NO: 1297 - protein, 220 aa, synthetic construct
EVQLVESGGGLVQPGGSLRLSCAASGFTFSRTGMHWVRQAPGKGLEWVSYISSSSSTILYADTLKGRFTISRDNSKNTLYLQMNSLRAEDTAVYYCARRGEGAMDYWGQGTTVTVSSASTKGPSVFPLAPSSKSTSGGTAALGCLVKDYFPEPVTVSWNSGALTSGVHTFPAVLQSSGLYSLSSVVTVPSSSLGTQTYICNVNHKPSNTKVDKKVEPKSC

SEQ ID NO: 1298 - protein, 220 aa, synthetic construct
EVQLVESGGGLVQPGGSLRLSCAASGFTFSIKGMHWVRQAPGKGLEWVSYISSGSSTIYYADTLKGRFTISRDNSKNTLYLQMNSLRAEDTAVYYCARRGAGAMDYWGQGTTVTVSSASTKGPSVFPLAPSSKSTSGGTAALGCLVKDYFPEPVTVSWNSGALTSGVHTFPAVLQSSGLYSLSSVVTVPSSSLGTQTYICNVNHKPSNTKVDKKVEPKSC

SEQ ID NO: 1299 - protein, 220 aa, synthetic construct
EVQLVESGGGLVQPGGSLRLSCAASGFTFSNKGMHWVRQAPGKGLEWVSYISSSSSTIYYADTLKGRFTISRDNSKNTLYLQMNSLRAEDTAVYYCARRGEGAMDYWGQGTTVTVSSASTKGPSVFPLAPSSKSTSGGTAALGCLVKDYFPEPVTVSWNSGALTSGVHTFPAVLQSSGLYSLSSVVTVPSSSLGTQTYICNVNHKPSNTKVDKKVEPKSC

SEQ ID NO: 1300 - protein, 220 aa, synthetic construct
EVQLVESGGGLVQPGGSLRLSCAASGFTFSLFGMHWVRQAPGKGLEWVSYISSWSSTILYADTLKGRFTISRDNSKNTLYLQMNSLRAEDTAVYYCARRGAGAMDYWGQGTTVTVSSASTKGPSVFPLAPSSKSTSGGTAALGCLVKDYFPEPVTVSWNSGALTSGVHTFPAVLQSSGLYSLSSVVTVPSSSLGTQTYICNVNHKPSNTKVDKKVEPKSC

SEQ ID NO: 1301 - protein, 220 aa, synthetic construct
EVQLVESGGGLVQPGGSLRLSCAASGFTFSIFGMHWVRQAPGKGLEWVSYISSWSSTIYYADTLKGRFTISRDNSKNTLYLQMNSLRAEDTAVYYCARRGEGAMDYWGQGTTVTVSSASTKGPSVFPLAPSSKSTSGGTAALGCLVKDYFPEPVTVSWNSGALTSGVHTFPAVLQSSGLYSLSSVVTVPSSSLGTQTYICNVNHKPSNTKVDKKVEPKSC

SEQ ID NO: 1302 - protein, 220 aa, synthetic construct
EVQLVESGGGLVQPGGSLRLSCAASGFTFSRFGMHWVRQAPGKGLEWVSYISSWSSTILYADTLKGRFTISRDNSKNTLYLQMNSLRAEDTAVYYCARRGEGAMDYWGQGTTVTVSSASTKGPSVFPLAPSSKSTSGGTAALGCLVKDYFPEPVTVSWNSGALTSGVHTFPAVLQSSGLYSLSSVVTVPSSSLGTQTYICNVNHKPSNTKVDKKVEPKSC

SEQ ID NO: 1303 - protein, 220 aa, synthetic construct
EVQLVESGGGLVQPGGSLRLSCAASGFTFSRKGMHWVRQAPGKGLEWVSYISSTSSTILYADTLKGRFTISRDNSKNTLYLQMNSLRAEDTAVYYCARRGEGAMDYWGQGTTVTVSSASTKGPSVFPLAPSSKSTSGGTAALGCLVKDYFPEPVTVSWNSGALTSGVHTFPAVLQSSGLYSLSSVVTVPSSSLGTQTYICNVNHKPSNTKVDKKVEPKSC

SEQ ID NO: 1304 - protein, 220 aa, synthetic construct
EVQLVESGGGLVQPGGSLRLSCAASGFTFSIFGMHWVRQAPGKGLEWVSYISSWSSTIYYADTLKGRFTISRDNSKNTLYLQMNSLRAEDTAVYYCARRGAGAMDYWGQGTTVTVSSASTKGPSVFPLAPSSKSTSGGTAALGCLVKDYFPEPVTVSWNSGALTSGVHTFPAVLQSSGLYSLSSVVTVPSSSLGTQTYICNVNHKPSNTKVDKKVEPKSC

SEQ ID NO: 1305 - protein, 220 aa, synthetic construct
EVQLVESGGGLVQPGGSLRLSCAASGFTFSIFGMHWVRQAPGKGLEWVSYISSSSSTILYADTLKGRFTISRDNSKNTLYLQMNSLRAEDTAVYYCARRGAGAMDYWGQGTTVTVSSASTKGPSVFPLAPSSKSTSGGTAALGCLVKDYFPEPVTVSWNSGALTSGVHTFPAVLQSSGLYSLSSVVTVPSSSLGTQTYICNVNHKPSNTKVDKKVEPKSC

SEQ ID NO: 1306 - protein, 220 aa, synthetic construct
EVQLVESGGGLVQPGGSLRLSCAASGFTFSNKGMHWVRQAPGKGLEWVSYISSSSSTILYADTLKGRFTISRDNSKNTLYLQMNSLRAEDTAVYYCARRGAGAMDYWGQGTTVTVSSASTKGPSVFPLAPSSKSTSGGTAALGCLVKDYFPEPVTVSWNSGALTSGVHTFPAVLQSSGLYSLSSVVTVPSSSLGTQTYICNVNHKPSNTKVDKKVEPKSC

SEQ ID NO: 1307 - protein, 220 aa, synthetic construct
EVQLVESGGGLVQPGGSLRLSCAASGFTFSRFGMHWVRQAPGKGLEWVSYISSTSSTIYYADTLKGRFTISRDNSKNTLYLQMNSLRAEDTAVYYCARRGEGAMDYWGQGTTVTVSSASTKGPSVFPLAPSSKSTSGGTAALGCLVKDYFPEPVTVSWNSGALTSGVHTFPAVLQSSGLYSLSSVVTVPSSSLGTQTYICNVNHKPSNTKVDKKVEPKSC

SEQ ID NO: 1308 - protein, 220 aa, synthetic construct
EVQLVESGGGLVQPGGSLRLSCAASGFTFSITGMHWVRQAPGKGLEWVSYISSWSSTIYYADTLKGRFTISRDNSKNTLYLQMNSLRAEDTAVYYCARRGAGAMDYWGQGTTVTVSSASTKGPSVFPLAPSSKSTSGGTAALGCLVKDYFPEPVTVSWNSGALTSGVHTFPAVLQSSGLYSLSSVVTVPSSSLGTQTYICNVNHKPSNTKVDKKVEPKSC

SEQ ID NO: 1309 - protein, 220 aa, synthetic construct
EVQLVESGGGLVQPGGSLRLSCAASGFTFSRKGMHWVRQAPGKGLEWVSYISSGSSTIYYADTLKGRFTISRDNSKNTLYLQMNSLRAEDTAVYYCARRGAGAMDYWGQGTTVTVSSASTKGPSVFPLAPSSKSTSGGTAALGCLVKDYFPEPVTVSWNSGALTSGVHTFPAVLQSSGLYSLSSVVTVPSSSLGTQTYICNVNHKPSNTKVDKKVEPKSC

SEQ ID NO: 1310 - protein, 220 aa, synthetic construct
EVQLVESGGGLVQPGGSLRLSCAASGFTFSITGMHWVRQAPGKGLEWVSYISSTSSTILYADTLKGRFTISRDNSKNTLYLQMNSLRAEDTAVYYCARRGEGAMDYWGQGTTVTVSSASTKGPSVFPLAPSSKSTSGGTAALGCLVKDYFPEPVTVSWNSGALTSGVHTFPAVLQSSGLYSLSSVVTVPSSSLGTQTYICNVNHKPSNTKVDKKVEPKSC

SEQ ID NO: 1311 - protein, 220 aa, synthetic construct
EVQLVESGGGLVQPGGSLRLSCAASGFTFSIKGMHWVRQAPGKGLEWVSYISSSSSTILYADTLKGRFTISRDNSKNTLYLQMNSLRAEDTAVYYCARRGAGAMDYWGQGTTVTVSSASTKGPSVFPLAPSSKSTSGGTAALGCLVKDYFPEPVTVSWNSGALTSGVHTFPAVLQSSGLYSLSSVVTVPSSSLGTQTYICNVNHKPSNTKVDKKVEPKSC

SEQ ID NO: 1312 - protein, 220 aa, synthetic construct
EVQLVESGGGLVQPGGSLRLSCAASGFTFSRKGMHWVRQAPGKGLEWVSYISSWSSTIYYADTLKGRFTISRDNSKNTLYLQMNSLRAEDTAVYYCARRGAGAMDYWGQGTTVTVSSASTKGPSVFPLAPSSKSTSGGTAALGCLVKDYFPEPVTVSWNSGALTSGVHTFPAVLQSSGLYSLSSVVTVPSSSLGTQTYICNVNHKPSNTKVDKKVEPKSC

SEQ ID NO: 1313 - protein, 220 aa, synthetic construct
EVQLVESGGGLVQPGGSLRLSCAASGFTFSIYGMHWVRQAPGKGLEWVSYISSTSSTILYADTLKGRFTISRDNSKNTLYLQMNSLRAEDTAVYYCARRGAGAMDYWGQGTTVTVSSASTKGPSVFPLAPSSKSTSGGTAALGCLVKDYFPEPVTVSWNSGALTSGVHTFPAVLQSSGLYSLSSVVTVPSSSLGTQTYICNVNHKPSNTKVDKKVEPKSC

SEQ ID NO: 1314 - protein, 220 aa, synthetic construct
EVQLVESGGGLVQPGGSLRLSCAASGFTFSRTGMHWVRQAPGKGLEWVSYISSGSSTILYADTLKGRFTISRDNSKNTLYLQMNSLRAEDTAVYYCARRGEGAMDYWGQGTTVTVSSASTKGPSVFPLAPSSKSTSGGTAALGCLVKDYFPEPVTVSWNSGALTSGVHTFPAVLQSSGLYSLSSVVTVPSSSLGTQTYICNVNHKPSNTKVDKKVEPKSC

SEQ ID NO: 1315 - protein, 220 aa, synthetic construct
EVQLVESGGGLVQPGGSLRLSCAASGFTFSNTGMHWVRQAPGKGLEWVSYISSTSSTILYADTLKGRFTISRDNSKNTLYLQMNSLRAEDTAVYYCARRGAGAMDYWGQGTTVTVSSASTKGPSVFPLAPSSKSTSGGTAALGCLVKDYFPEPVTVSWNSGALTSGVHTFPAVLQSSGLYSLSSVVTVPSSSLGTQTYICNVNHKPSNTKVDKKVEPKSC

SEQ ID NO: 1316 - protein, 220 aa, synthetic construct
EVQLVESGGGLVQPGGSLRLSCAASGFTFSNKGMHWVRQAPGKGLEWVSYISSGSSTILYADTLKGRFTISRDNSKNTLYLQMNSLRAEDTAVYYCARRGEGAMDYWGQGTTVTVSSASTKGPSVFPLAPSSKSTSGGTAALGCLVKDYFPEPVTVSWNSGALTSGVHTFPAVLQSSGLYSLSSVVTVPSSSLGTQTYICNVNHKPSNTKVDKKVEPKSC

SEQ ID NO: 1317 - protein, 220 aa, synthetic construct
EVQLVESGGGLVQPGGSLRLSCAASGFTFSITGMHWVRQAPGKGLEWVSYISSTSSTILYADTLKGRFTISRDNSKNTLYLQMNSLRAEDTAVYYCARRGAGAMDYWGQGTTVTVSSASTKGPSVFPLAPSSKSTSGGTAALGCLVKDYFPEPVTVSWNSGALTSGVHTFPAVLQSSGLYSLSSVVTVPSSSLGTQTYICNVNHKPSNTKVDKKVEPKSC

SEQ ID NO: 1318 - skipped

SEQ ID NO: 1319 - protein, 220 aa, synthetic construct
EVQLVESGGGLVQPGGSLRLSCAASGFTFSITGMHWVRQAPGKGLEWVSYISSSSSTIYYADTLKGRFTISRDNSKNTLYLQMNSLRAEDTAVYYCARRGAGAMDYWGQGTTVTVSSASTKGPSVFPLAPSSKSTSGGTAALGCLVKDYFPEPVTVSWNSGALTSGVHTFPAVLQSSGLYSLSSVVTVPSSSLGTQTYICNVNHKPSNTKVDKKVEPKSC

SEQ ID NO: 1320 - protein, 220 aa, synthetic construct
EVQLVESGGGLVQPGGSLRLSCAASGFTFSRTGMHWVRQAPGKGLEWVSYISSWSSTIYYADTLKGRFTISRDNSKNTLYLQMNSLRAEDTAVYYCARRGEGAMDYWGQGTTVTVSSASTKGPSVFPLAPSSKSTSGGTAALGCLVKDYFPEPVTVSWNSGALTSGVHTFPAVLQSSGLYSLSSVVTVPSSSLGTQTYICNVNHKPSNTKVDKKVEPKSC

SEQ ID NO: 1321 - protein, 220 aa, synthetic construct
EVQLVESGGGLVQPGGSLRLSCAASGFTFSNFGMHWVRQAPGKGLEWVSYISSWSSTIYYADTLKGRFTISRDNSKNTLYLQMNSLRAEDTAVYYCARRGAGAMDYWGQGTTVTVSSASTKGPSVFPLAPSSKSTSGGTAALGCLVKDYFPEPVTVSWNSGALTSGVHTFPAVLQSSGLYSLSSVVTVPSSSLGTQTYICNVNHKPSNTKVDKKVEPKSC

SEQ ID NO: 1322 - protein, 220 aa, synthetic construct
EVQLVESGGGLVQPGGSLRLSCAASGFTFSNTGMHWVRQAPGKGLEWVSYISSTSSTILYADTLKGRFTISRDNSKNTLYLQMNSLRAEDTAVYYCARRGEGAMDYWGQGTTVTVSSASTKGPSVFPLAPSSKSTSGGTAALGCLVKDYFPEPVTVSWNSGALTSGVHTFPAVLQSSGLYSLSSVVTVPSSSLGTQTYICNVNHKPSNTKVDKKVEPKSC

SEQ ID NO: 1323 - protein, 220 aa, synthetic construct
EVQLVESGGGLVQPGGSLRLSCAASGFTFSNTGMHWVRQAPGKGLEWVSYISSSSSTILYADTLKGRFTISRDNSKNTLYLQMNSLRAEDTAVYYCARRGAGAMDYWGQGTTVTVSSASTKGPSVFPLAPSSKSTSGGTAALGCLVKDYFPEPVTVSWNSGALTSGVHTFPAVLQSSGLYSLSSVVTVPSSSLGTQTYICNVNHKPSNTKVDKKVEPKSC

SEQ ID NO: 1324 - protein, 220 aa, synthetic construct
EVQLVESGGGLVQPGGSLRLSCAASGFTFSRTGMHWVRQAPGKGLEWVSYISSWSSTILYADTLKGRFTISRDNSKNTLYLQMNSLRAEDTAVYYCARRGAGAMDYWGQGTTVTVSSASTKGPSVFPLAPSSKSTSGGTAALGCLVKDYFPEPVTVSWNSGALTSGVHTFPAVLQSSGLYSLSSVVTVPSSSLGTQTYICNVNHKPSNTKVDKKVEPKSC

SEQ ID NO: 1325 - protein, 220 aa, synthetic construct
EVQLVESGGGLVQPGGSLRLSCAASGFTFSNKGMHWVRQAPGKGLEWVSYISSWSSTILYADTLKGRFTISRDNSKNTLYLQMNSLRAEDTAVYYCARRGAGAMDYWGQGTTVTVSSASTKGPSVFPLAPSSKSTSGGTAALGCLVKDYFPEPVTVSWNSGALTSGVHTFPAVLQSSGLYSLSSVVTVPSSSLGTQTYICNVNHKPSNTKVDKKVEPKSC

SEQ ID NO: 1326 - protein, 220 aa, synthetic construct
EVQLVESGGGLVQPGGSLRLSCAASGFTFSNKGMHWVRQAPGKGLEWVSYISSGSSTILYADTLKGRFTISRDNSKNTLYLQMNSLRAEDTAVYYCARRGAGAMDYWGQGTTVTVSSASTKGPSVFPLAPSSKSTSGGTAALGCLVKDYFPEPVTVSWNSGALTSGVHTFPAVLQSSGLYSLSSVVTVPSSSLGTQTYICNVNHKPSNTKVDKKVEPKSC

SEQ ID NO: 1327 - protein, 220 aa, synthetic construct
EVQLVESGGGLVQPGGSLRLSCAASGFTFSNTGMHWVRQAPGKGLEWVSYISSSSSTIYYADTLKGRFTISRDNSKNTLYLQMNSLRAEDTAVYYCARRGAGAMDYWGQGTTVTVSSASTKGPSVFPLAPSSKSTSGGTAALGCLVKDYFPEPVTVSWNSGALTSGVHTFPAVLQSSGLYSLSSVVTVPSSSLGTQTYICNVNHKPSNTKVDKKVEPKSC

SEQ ID NO: 1328 - protein, 220 aa, synthetic construct
EVQLVESGGGLVQPGGSLRLSCAASGFTFSITGMHWVRQAPGKGLEWVSYISSSSSTILYADTLKGRFTISRDNSKNTLYLQMNSLRAEDTAVYYCARRGEGAMDYWGQGTTVTVSSASTKGPSVFPLAPSSKSTSGGTAALGCLVKDYFPEPVTVSWNSGALTSGVHTFPAVLQSSGLYSLSSVVTVPSSSLGTQTYICNVNHKPSNTKVDKKVEPKSC

SEQ ID NO: 1329 - protein, 10 aa, synthetic construct
  VARIANT 2: note = replace with L, M, F, W or Y
  VARIANT 3: note = T, A, R, N, D, Q, E, G, H, I, L, K, M, F, S, W, Y or V
  VARIANT 4: note = F, W or Y
  VARIANT 5: note = R, N, Q, G, H, K, M, F, P, S, W, Y or V
  VARIANT 6: note = N, A, R, D, Q, G, H, I, L, K, M, F, S, T, W, Y or V
  VARIANT 7: note = F, A, R, N, Q, E, G, H, I, L, K, M, T, W, Y or V
  VARIANT 10: note = H, N, F or W
GIXXXXXGMX

SEQ ID NO: 1330 - protein, 17 aa, synthetic construct
  VARIANT 4: note = S or T
  VARIANT 5: note = G, A, R, N, Q, E, H, I, L, K, M, F, P, S, T, W, Y or V
  VARIANT 6: note = S, A, Q, G, H or T
  VARIANT 7: note = S, R, Q, G, H, K, M or T
  VARIANT 8: note = T, A, L, S or V
  VARIANT 9: note = I, A, R, N, D, E, H, L, K, M, F, P, S, T, W, Y or V
  VARIANT 10: note = Y, A, R, Q, G, H, I, L, K, M, F, T or V
  VARIANT 12: note = A, R, N, D, Q, E, G, H, I, L, K, M, F, P, S, T, W, Y or V
  VARIANT 13: note = D, R, N, Q, E, G, H, I, K, P, T or Y
  VARIANT 14: note = T, A, R, N, D, Q, E, G, H, I, L, K, M, F, P, S, W, Y or V
YISXXXXXXXYXXXLKG

SEQ ID NO: 1331 - protein, 10 aa, synthetic construct
  VARIANT 4: note = N, G, H or S
  VARIANT 5: note = E, A, R, N, D, G, H, I, L, K, M, P, S, T, W, Y or V
  VARIANT 6: note = G or H
  VARIANT 8: note = M or L
  VARIANT 9: note = D or K
  VARIANT 10: note = Y, A, R, N, Q, G, H, L, M, P, S, T, W or V
ARRXXXAXXX

SEQ ID NO: 1332 - protein, 10 aa, synthetic construct
  VARIANT 3: note = replace with A, R, N, D, Q, G, H, I, L, M, P, T, W, Y or V
  VARIANT 4: note = S, A, R, N, D, Q, E, G, H, I, L, K, M, F, P, T, W, Y or V
  VARIANT 5: note = S, A, R, N, D, Q, E, G, H, I, K, M, F, P, T, W, Y or V
  VARIANT 6: note = V, I or T
  VARIANT 7: note = N, A, R, K, M or V
  VARIANT 8: note = R, K, F or Y
  VARIANT 9: note = I, A, Q, L, M, S or T
RASXXXXXXY

SEQ ID NO: 1333 - protein, 7 aa, synthetic construct
  VARIANT 1: note = replace with L, K, M, F, T, W or Y
  VARIANT 2: note = replace with I, S or T
  VARIANT 3: note = replace with A, R, N, D, Q, E, G, H, I, L, K, F, T, W, Y or V
  VARIANT 4: note = replace with A, R, D, E, G, H, I, L, K, M, F, S, W, Y or V
  VARIANT 5: note = L, A, R, N, H, K, F, P, W or V
  VARIANT 6: note = A, R, Q, G, H, I, K, F, P, T or V
  VARIANT 7: note = P, R, N, D, Q, E, G, H, I, L, M, F, S, T, W, Y or V
HASNXXX

SEQ ID NO: 1334 - protein, 9 aa, synthetic construct
  VARIANT 2: note = replace with E
  VARIANT 3: note = replace with A, Q, L, K, M, S or Y
  VARIANT 4: note = T, I or S
  VARIANT 5: note = S, A, R, N, D, Q, G, H, I, L, K, M, F, T, W, Y or V
  VARIANT 6: note = S, A, R, N, Q, E, H, L, K, M, F, P, T, W or V
  VARIANT 8: note = F, L, M, P or V
  VARIANT 9: note = T, R, Q, E, H, I, L, K, M, F, S, W, Y or V
QQFXXXPXX

SEQ ID NO: 1335-1340 - skipped (6 entries)

SEQ ID NO: 1341 - protein, 10 aa, synthetic construct
GFTFSNFGMH

SEQ ID NO: 1342 - protein, 15 aa, synthetic construct
GGGGSGGGGSGGGGS

SEQ ID NO: 1343 - protein, 112 aa, synthetic construct
DIVMTQSPATLSLSPGERATLSCRSSKSLQNVNGNTYLYWFQQKPGQSPQLLIYRMSNLNSGVPDRFSGSGSGTEFTLTISSLEPEDFAVYYCMQHLEYPITFGAGTKLEIK

SEQ ID NO: 1344 - protein, 106 aa, synthetic construct
EIVLTQSPATLSLSPGERATLSCSASSSVGYMHWYQQKPGQAPRLLIYDTSKLAFGIPARFSGSGSGTDFTLTISSLEPEDFAVYYCFQGSVYPFTFGQGTKLEIK

SEQ ID NO: 1345 - protein, 121 aa, synthetic construct
EVQLVESGGGLVKPGGSLKLSCAASGYTFTSYVMHWVRQAPGKGLEWIGYINPYNDGTKYNEKFQGRVTISSDKSISTAYMELSSLRSEDTAMYYCARGTYYYGTRVFDYWGQGTLVTVSS

SEQ ID NO: 1346 - protein, 120 aa, synthetic construct
QVQLQESGPGLVKPSQTLSLTCTVSGGSISTSTMGVGWIRQHPGKGLEWIGFIWWDDDKRYNPNLKSRVTMSVDTSKNQFSLKLSSVTAADTAVYYCARMELWSYYFDPWGQGTLVTVSS

SEQ ID NO: 1347 - protein, 16 aa, synthetic construct
RSSKSLQNVNGNTYLY

SEQ ID NO: 1348 - protein, 10 aa, synthetic construct
SASSSVGYMH

SEQ ID NO: 1349 - protein, 7 aa, synthetic construct
RMSNLNS

SEQ ID NO: 1350 - protein, 7 aa, synthetic construct
DTSKLAF

SEQ ID NO: 1351 - protein, 9 aa, synthetic construct
MQHLEYPIT

SEQ ID NO: 1352 - protein, 9 aa, synthetic construct
FQGSVYPFT

SEQ ID NO: 1353 - protein, 5 aa, synthetic construct
SYVMH

SEQ ID NO: 1354 - protein, 7 aa, synthetic construct
TSTMGVG

SEQ ID NO: 1355 - protein, 17 aa, synthetic construct
YINPYNDGTKYNEKFQG

SEQ ID NO: 1356 - protein, 16 aa, synthetic construct
FIWWDDDKRYNPNLKS

SEQ ID NO: 1357 - protein, 12 aa, synthetic construct
GTYYYGTRVFDY

SEQ ID NO: 1358 - protein, 10 aa, synthetic construct
MELWSYYFDP

SEQ ID NO: 1359 - protein, 11 aa, synthetic construct
KSLQNVNGNTY

SEQ ID NO: 1360 - protein, 5 aa, synthetic construct
SSVGY

SEQ ID NO: 1361 - protein, 8 aa, synthetic construct
GYTFTSYV

SEQ ID NO: 1362 - protein, 10 aa, synthetic construct
GGSISTSTMG

SEQ ID NO: 1363 - protein, 8 aa, synthetic construct
INPYNDGT

SEQ ID NO: 1364 - protein, 7 aa, synthetic construct
IWWDDDK

SEQ ID NO: 1365 - protein, 14 aa, synthetic construct
ARGTYYYGTRVFDY

SEQ ID NO: 1366 - protein, 12 aa, synthetic construct
ARMELWSYYFDP

SEQ ID NO: 1367 - protein, 253 aa, synthetic construct
DIVMTQSPATLSLSPGERATLSCRSSKSLQNVNGNTYLYWFQQKPGQSPQLLIYRMSNLNSGVPDRFSGSGSGTEFTLTISSLEPEDFAVYYCMQHLEYPITFGAGTKLEIKGGGGSGGGGSGGGGSGGGGSEVQLVESGGGLVKPGGSLKLSCAASGYTFTSYVMHWVRQAPGKGLEWIGYINPYNDGTKYNEKFQGRVTISSDKSISTAYMELSSLRSEDTAMYYCARGTYYYGTRVFDYWGQGTLVTVSS

SEQ ID NO: 1368 - protein, 219 aa, synthetic construct
DIVMTQSPATLSLSPGERATLSCRSSKSLQNVNGNTYLYWFQQKPGQSPQLLIYRMSNLNSGVPDRFSGSGSGTEFTLTISSLEPEDFAVYYCMQHLEYPITFGAGTKLEIKRTVAAPSVFIFPPSDEQLKSGTASVVCLLNNFYPREAKVQWKVDNALQSGNSQESVTEQDSKDSTYSLSSTLTLSKADYEKHKVYACEVTHQGLSSPVTKSFNRGEC

SEQ ID NO: 1369 - protein, 213 aa, synthetic construct
EIVLTQSPATLSLSPGERATLSCSASSSVGYMHWYQQKPGQAPRLLIYDTSKLAFGIPARFSGSGSGTDFTLTISSLEPEDFAVYYCFQGSVYPFTFGQGTKLEIKRTVAAPSVFIFPPSDEQLKSGTASVVCLLNNFYPREAKVQWKVDNALQSGNSQESVTEQDSKDSTYSLSSTLTLSKADYEKHKVYACEVTHQGLSSPVTKSFNRGEC

SEQ ID NO: 1370 - protein, 224 aa, synthetic construct
EVQLVESGGGLVKPGGSLKLSCAASGYTFTSYVMHWVRQAPGKGLEWIGYINPYNDGTKYNEKFQGRVTISSDKSISTAYMELSSLRSEDTAMYYCARGTYYYGTRVFDYWGQGTLVTVSSASTKGPSVFPLAPSSKSTSGGTAALGCLVKDYFPEPVTVSWNSGALTSGVHTFPAVLQSSGLYSLSSVVTVPSSSLGTQTYICNVNHKPSNTKVDKKVEPKSC

SEQ ID NO: 1371 - protein, 223 aa, synthetic construct
QVQLQESGPGLVKPSQTLSLTCTVSGGSISTSTMGVGWIRQHPGKGLEWIGFIWWDDDKRYNPNLKSRVTMSVDTSKNQFSLKLSSVTAADTAVYYCARMELWSYYFDPWGQGTLVTVSSASTKGPSVFPLAPSSKSTSGGTAALGCLVKDYFPEPVTVSWNSGALTSGVHTFPAVLQSSGLYSLSSVVTVPSSSLGTQTYICNVNHKPSNTKVDKKVEPKSC

SEQ ID NO: 1372-1411 - skipped (40 entries)

SEQ ID NO: 1412 - protein, 225 aa, synthetic construct
DKTHTCPPCPAPEAAGGPSVFLFPPKPKDTLMISRTPEVTCVVVDVSHEDPEVKFNWYVDGVEVHNAKTKPREEQYGSTYRVVSVLTVLHQDWLNGKEYKCKVSNKALGAPIEKTISKAKGQPREPQVCTLPPSRDELTKNQVSLSCAVKGFYPSDIAVEWESNGQPENNYKTTPPVLDSDGSFFLVSKLTVDKSRWQQGNVFSCSVMHEALHNHYTQKSLSLSP

SEQ ID NO: 1413 - protein, 227 aa, synthetic construct
DKTHTCPPCPAPEAAGGPSVFLFPPKPKDTLMISRTPEVTCVVVDVSHEDPEVKFNWYVDGVEVHNAKTKPREEQYNSTYRVVSVLTVLHQDWLNGKEYKCKVSNKALGAPIEKTISKAKGQPREPQVCTLPPSRDELTKNQVSLSCAVKGFYPSDIAVEWESNGQPENNYKTTPPVLDSDGSFFLVSKLTVDKSRWQQGNVFSCSVMHEALHNRFTQKSLSLSPGK

SEQ ID NO: 1414 - protein, 225 aa, synthetic construct
DKTHTCPPCPAPEAAGGPSVFLFPPKPKDTLMISRTPEVTCVVVDVSHEDPEVKFNWYVDGVEVHNAKTKPREEQYGSTYRVVSVLTVLHQDWLNGKEYKCKVSNKALGAPIEKTISKAKGQPREPQVYTLPPCRDELTKNQVSLWCLVKGFYPSDIAVEWESNGQPENNYKTTPPVLDSDGSFFLYSKLTVDKSRWQQGNVFSCSVMHEALHNHYTQKSLSLSP

SEQ ID NO: 1415 - protein, 227 aa, synthetic construct
DKTHTCPPCPAPEAAGGPSVFLFPPKPKDTLMISRTPEVTCVVVDVSHEDPEVKFNWYVDGVEVHNAKTKPREEQYNSTYRVVSVLTVLHQDWLNGKEYKCKVSNKALGAPIEKTISKAKGQPREPQVYTLPPCRDELTKNQVSLWCLVKGFYPSDIAVEWESNGQPENNYKTTPPVLDSDGSFFLYSKLTVDKSRWQQGNVFSCSVMHEALHNHYTQKSLSLSPGK

SEQ ID NO: 1416 - protein, 465 aa, synthetic construct
QVQLVQSGAEVKKPGSSVKVSCKASGYSFTTYYIHWVRQAPGQCLEWMGWFFPGSGNIKYNEKFKGRVTITADTSTSTAYMELSSLRSEDTAVYYCAGSYYSYDVLDYWGQGTTVTVSSGGGGSGGGGSGGGGSDIQMTQSPSFLSASVGDRVTITCKASQNVGINVVWHQQKPGKAPKALIYSSSHRYSGVPSRFSGSGSGTEFTLTISSLQPEDFATYFCQQFKSYPLTFGCGTKLEIKGGGGSDIVMTQSPATLSLSPGERATLSCRSSKSLQNVNGNTYLYWFQQKPGQSPQLLIYRMSNLNSGVPDRFSGSGSGTEFTLTISSLEPEDFAVYYCMQHLEYPITFGAGTKLEIKRTVAAPSVFIFPPSDEQLKSGTASVVCLLNNFYPREAKVQWKVDNALQSGNSQESVTEQDSKDSTYSLSSTLTLSKADYEKHKVYACEVTHQGLSSPVTKSFNRGEC

SEQ ID NO: 1417 - protein, 449 aa, synthetic construct
EVQLVESGGGLVKPGGSLKLSCAASGYTFTSYVMHWVRQAPGKGLEWIGYINPYNDGTKYNEKFQGRVTISSDKSISTAYMELSSLRSEDTAMYYCARGTYYYGTRVFDYWGQGTLVTVSSASTKGPSVFPLAPSSKSTSGGTAALGCLVKDYFPEPVTVSWNSGALTSGVHTFPAVLQSSGLYSLSSVVTVPSSSLGTQTYICNVNHKPSNTKVDKKVEPKSCDKTHTCPPCPAPEAAGGPSVFLFPPKPKDTLMISRTPEVTCVVVDVSHEDPEVKFNWYVDGVEVHNAKTKPREEQYGSTYRVVSVLTVLHQDWLNGKEYKCKVSNKALGAPIEKTISKAKGQPREPQVYTLPPCRDELTKNQVSLWCLVKGFYPSDIAVEWESNGQPENNYKTTPPVLDSDGSFFLYSKLTVDKSRWQQGNVFSCSVMHEALHNHYTQKSLSLSP

SEQ ID NO: 1418 - protein, 694 aa, synthetic construct
QVQLVQSGAEVKKPGSSVKVSCKASGYSFTTYYIHWVRQAPGQCLEWMGWFFPGSGNIKYNEKFKGRVTITADTSTSTAYMELSSLRSEDTAVYYCAGSYYSYDVLDYWGQGTTVTVSSGGGGSGGGGSGGGGSDIQMTQSPSFLSASVGDRVTITCKASQNVGINVVWHQQKPGKAPKALIYSSSHRYSGVPSRFSGSGSGTEFTLTISSLQPEDFATYFCQQFKSYPLTFGCGTKLEIKGGGGSQVQLQESGPGLVKPSQTLSLTCTVSGGSISTSTMGVGWIRQHPGKGLEWIGFIWWDDDKRYNPNLKSRVTMSVDTSKNQFSLKLSSVTAADTAVYYCARMELWSYYFDPWGQGTLVTVSSASTKGPSVFPLAPSSKSTSGGTAALGCLVKDYFPEPVTVSWNSGALTSGVHTFPAVLQSSGLYSLSSVVTVPSSSLGTQTYICNVNHKPSNTKVDKKVEPKSCDKTHTCPPCPAPEAAGGPSVFLFPPKPKDTLMISRTPEVTCVVVDVSHEDPEVKFNWYVDGVEVHNAKTKPREEQYGSTYRVVSVLTVLHQDWLNGKEYKCKVSNKALGAPIEKTISKAKGQPREPQVYTLPPCRDELTKNQVSLWCLVKGFYPSDIAVEWESNGQPENNYKTTPPVLDSDGSFFLYSKLTVDKSRWQQGNVFSCSVMHEALHNHYTQKSLSLSP

SEQ ID NO: 1419 - protein, 465 aa, synthetic construct
QVQLVQSGAEVKKPGSSVKVSCKASGYSFTLYYIHWVRQAPGQCLEWMGWFFPGSGNIKYNEKFKGRVTITADTSTSTAYMELSSLRSEDTAVYYCAASYYSFDVLDYWGQGTTVTVSSGGGGSGGGGSGGGGSDIQMTQSPSFLSASVGDRVTITCKASQNVGIRVVWHQQKPGKAPKALIYSSSHRYSGVPSRFSGSGSGTEFTLTISSLQPEDFATYFCQQFKSYPITFGCGTKLEIKGGGGSDIVMTQSPATLSLSPGERATLSCRSSKSLQNVNGNTYLYWFQQKPGQSPQLLIYRMSNLNSGVPDRFSGSGSGTEFTLTISSLEPEDFAVYYCMQHLEYPITFGAGTKLEIKRTVAAPSVFIFPPSDEQLKSGTASVVCLLNNFYPREAKVQWKVDNALQSGNSQESVTEQDSKDSTYSLSSTLTLSKADYEKHKVYACEVTHQGLSSPVTKSFNRGEC

SEQ ID NO: 1420 - protein, 465 aa, synthetic construct
QVQLVQSGAEVKKPGSSVKVSCKASGYSFTTYYIHWVRQAPGQCLEWMGWFFPRSGNIKYNEKFKGRVTITADTSTSTAYMELSSLRSEDTAVYYCAASYYSFDVLDYWGQGTTVTVSSGGGGSGGGGSGGGGSDIQMTQSPSFLSASVGDRVTITCKASQNVGIRVVWHQQKPGKAPKALIYSSSHRYSGVPSRFSGSGSGTEFTLTISSLQPEDFATYFCQQFKSYPITFGCGTKLEIKGGGGSDIVMTQSPATLSLSPGERATLSCRSSKSLQNVNGNTYLYWFQQKPGQSPQLLIYRMSNLNSGVPDRFSGSGSGTEFTLTISSLEPEDFAVYYCMQHLEYPITFGAGTKLEIKRTVAAPSVFIFPPSDEQLKSGTASVVCLLNNFYPREAKVQWKVDNALQSGNSQESVTEQDSKDSTYSLSSTLTLSKADYEKHKVYACEVTHQGLSSPVTKSFNRGEC

SEQ ID NO: 1421 - protein, 694 aa, synthetic construct
QVQLVQSGAEVKKPGSSVKVSCKASGYSFTLYYIHWVRQAPGQCLEWMGWFFPGSGNIKYNEKFKGRVTITADTSTSTAYMELSSLRSEDTAVYYCAASYYSFDVLDYWGQGTTVTVSSGGGGSGGGGSGGGGSDIQMTQSPSFLSASVGDRVTITCKASQNVGIRVVWHQQKPGKAPKALIYSSSHRYSGVPSRFSGSGSGTEFTLTISSLQPEDFATYFCQQFKSYPITFGCGTKLEIKGGGGSQVQLQESGPGLVKPSQTLSLTCTVSGGSISTSTMGVGWIRQHPGKGLEWIGFIWWDDDKRYNPNLKSRVTMSVDTSKNQFSLKLSSVTAADTAVYYCARMELWSYYFDPWGQGTLVTVSSASTKGPSVFPLAPSSKSTSGGTAALGCLVKDYFPEPVTVSWNSGALTSGVHTFPAVLQSSGLYSLSSVVTVPSSSLGTQTYICNVNHKPSNTKVDKKVEPKSCDKTHTCPPCPAPEAAGGPSVFLFPPKPKDTLMISRTPEVTCVVVDVSHEDPEVKFNWYVDGVEVHNAKTKPREEQYGSTYRVVSVLTVLHQDWLNGKEYKCKVSNKALGAPIEKTISKAKGQPREPQVYTLPPCRDELTKNQVSLWCLVKGFYPSDIAVEWESNGQPENNYKTTPPVLDSDGSFFLYSKLTVDKSRWQQGNVFSCSVMHEALHNHYTQKSLSLSP

SEQ ID NO: 1422 - protein, 694 aa, synthetic construct
QVQLVQSGAEVKKPGSSVKVSCKASGYSFTTYYIHWVRQAPGQCLEWMGWFFPRSGNIKYNEKFKGRVTITADTSTSTAYMELSSLRSEDTAVYYCAASYYSFDVLDYWGQGTTVTVSSGGGGSGGGGSGGGGSDIQMTQSPSFLSASVGDRVTITCKASQNVGIRVVWHQQKPGKAPKALIYSSSHRYSGVPSRFSGSGSGTEFTLTISSLQPEDFATYFCQQFKSYPITFGCGTKLEIKGGGGSQVQLQESGPGLVKPSQTLSLTCTVSGGSISTSTMGVGWIRQHPGKGLEWIGFIWWDDDKRYNPNLKSRVTMSVDTSKNQFSLKLSSVTAADTAVYYCARMELWSYYFDPWGQGTLVTVSSASTKGPSVFPLAPSSKSTSGGTAALGCLVKDYFPEPVTVSWNSGALTSGVHTFPAVLQSSGLYSLSSVVTVPSSSLGTQTYICNVNHKPSNTKVDKKVEPKSCDKTHTCPPCPAPEAAGGPSVFLFPPKPKDTLMISRTPEVTCVVVDVSHEDPEVKFNWYVDGVEVHNAKTKPREEQYGSTYRVVSVLTVLHQDWLNGKEYKCKVSNKALGAPIEKTISKAKGQPREPQVYTLPPCRDELTKNQVSLWCLVKGFYPSDIAVEWESNGQPENNYKTTPPVLDSDGSFFLYSKLTVDKSRWQQGNVFSCSVMHEALHNHYTQKSLSLSP

SEQ ID NO: 1423 - protein, 694 aa, synthetic construct
QVQLVQSGAEVKKPGSSVKVSCKASGHDFRLTYIHWVRQAPGQCLEWMGRVSAGSGNVKYNEKFKGRVTITADTSTSTAYMELSSLRSEDTAVYYCAVSYYSYDVLDYWGQGTTVTVSSGGGGSGGGGSGGGGSDIQMTQSPSFLSASVGDRVTITCKASQNVADRVVWHQQKPGKAPKALIYSSSHRYKGVPSRFSGSGSGTEFTLTISSLQPEDFATYFCQQFKSYPLTFGCGTKLEIKGGGGSQVQLQESGPGLVKPSQTLSLTCTVSGGSISTSTMGVGWIRQHPGKGLEWIGFIWWDDDKRYNPNLKSRVTMSVDTSKNQFSLKLSSVTAADTAVYYCARMELWSYYFDPWGQGTLVTVSSASTKGPSVFPLAPSSKSTSGGTAALGCLVKDYFPEPVTVSWNSGALTSGVHTFPAVLQSSGLYSLSSVVTVPSSSLGTQTYICNVNHKPSNTKVDKKVEPKSCDKTHTCPPCPAPEAAGGPSVFLFPPKPKDTLMISRTPEVTCVVVDVSHEDPEVKFNWYVDGVEVHNAKTKPREEQYGSTYRVVSVLTVLHQDWLNGKEYKCKVSNKALGAPIEKTISKAKGQPREPQVYTLPPCRDELTKNQVSLWCLVKGFYPSDIAVEWESNGQPENNYKTTPPVLDSDGSFFLYSKLTVDKSRWQQGNVFSCSVMHEALHNHYTQKSLSLSP

SEQ ID NO: 1424 - protein, 25 aa, synthetic construct
  REPEAT 1..5: note = single repeat of GGGGS
  VARIANT 6..25: note = up to 4 copies of GGGGS repeat may be deleted
GGGGSGGGGSGGGGSGGGGSGGGGS

SEQ ID NO: 1425 - protein, 5 aa, synthetic construct
GGGGS

SEQ ID NO: 1426 - protein, 220 aa, synthetic construct
EVQLVESGGGLVQPGGSLRLSCAASGFTFSYFGMHWVRQAPGKGLEWVSYISSGSSTIYYADTLKGRFTISRDNSKNTLYLQMNSLRAEDTAVYYCARRGEGAMDYWGQGTTVTVSSASTKGPSVFPLAPSSKSTSGGTAALGCLVKDYFPEPVTVSWNSGALTSGVHTFPAVLQSSGLYSLSSVVTVPSSSLGTQTYICNVNHKPSNTKVDKKVEPKSC

SEQ ID NO: 1427 - protein, 220 aa, synthetic construct
EVQLVESGGGLVQPGGSLRLSCAASGFTFSRFGMHWVRQAPGKGLEWVSYISSGSSTIYYADTLKGRFTISRDNSKNTLYLQMNSLRAEDTAVYYCARRGEGAMDYWGQGTTVTVSSASTKGPSVFPLAPSSKSTSGGTAALGCLVKDYFPEPVTVSWNSGALTSGVHTFPAVLQSSGLYSLSSVVTVPSSSLGTQTYICNVNHKPSNTKVDKKVEPKSC

SEQ ID NO: 1428 - protein, 427 aa, synthetic construct
DNQLTQSPSFLSASVGDRVTITCRASSSVNYIYWYQQKPGKAPKLLIYYTSNLAPGVPSRFSGSGSGNEYTLTISSLQPEDFATYYCQQFTSSPFTFGQGTKLEIKRTVAAPSVFIFPPSDEQLKSGTASVVCLLNNFYPREAKVQWKVDNALQSGNSQESVTEQDSKDSTYSLSSTLTLSKADYEKHKVYACEVTHQGLSSPVTKSFNRGECRTVAAPSVFIFPPSDEQLKSGTASVVCLLNNFYPREAKVQWKVDNALQSGNSQESVTEQDSKDSTYSLSSTLTLSKADYEKHKVYACEVTHQGLSSPVTKSFNRGECRTVAAPSVFIFPPSDEQLKSGTASVVCLLNNFYPREAKVQWKVDNALQSGNSQESVTEQDSKDSTYSLSSTLTLSKADYEKHKVYACEVTHQGLSSPVTKSFNRGEC

SEQ ID NO: 1429 - protein, 213 aa, synthetic construct
DNQLTQSPSFLSASVGDRVTITCRAMSSVNYIYWYQQKPGKAPKLLIYYTSNLAPGVPSRFSGSGSGNEYTLTISSLQPEDFATYYCQQFTSSPFTFGQGTKLEIKRTVAAPSVFIFPPSDEQLKSGTASVVCLLNNFYPREAKVQWKVDNALQSGNSQESVTEQDSKDSTYSLSSTLTLSKADYEKHKVYACEVTHQGLSSPVTKSFNRGEC

SEQ ID NO: 1430 - protein, 213 aa, synthetic construct
DNQLTQSPSFLSASVGDRVTITCRASRSVNYIYWYQQKPGKAPKLLIYYTSNLAPGVPSRFSGSGSGNEYTLTISSLQPEDFATYYCQQFTSSPFTFGQGTKLEIKRTVAAPSVFIFPPSDEQLKSGTASVVCLLNNFYPREAKVQWKVDNALQSGNSQESVTEQDSKDSTYSLSSTLTLSKADYEKHKVYACEVTHQGLSSPVTKSFNRGEC

SEQ ID NO: 1431 - protein, 220 aa, synthetic construct
EVQLVESGGGLVQPGGSLRLSCAASGFTFSIFGMHWVRQAPGKGLEWVSYISSGSSTIYYADTLKGRFTISRDNSKNTLYLQMNSLRAEDTAVYYCARRGEGAMDYWGQGTTVTVSSASTKGPSVFPLAPSSKSTSGGTAALGCLVKDYFPEPVTVSWNSGALTSGVHTFPAVLQSSGLYSLSSVVTVPSSSLGTQTYICNVNHKPSNTKVDKKVEPKSC

SEQ ID NO: 1432 - protein, 220 aa, synthetic construct
EVQLVESGGGLVQPGGSLRLSCAASGFTFSNKGMHWVRQAPGKGLEWVSYISSGSSTIYYADTLKGRFTISRDNSKNTLYLQMNSLRAEDTAVYYCARRGEGAMDYWGQGTTVTVSSASTKGPSVFPLAPSSKSTSGGTAALGCLVKDYFPEPVTVSWNSGALTSGVHTFPAVLQSSGLYSLSSVVTVPSSSLGTQTYICNVNHKPSNTKVDKKVEPKSC

SEQ ID NO: 1433 - protein, 220 aa, synthetic construct
EVQLVESGGGLVQPGGSLRLSCAASGFTFSNTGMHWVRQAPGKGLEWVSYISSGSSTIYYADTLKGRFTISRDNSKNTLYLQMNSLRAEDTAVYYCARRGEGAMDYWGQGTTVTVSSASTKGPSVFPLAPSSKSTSGGTAALGCLVKDYFPEPVTVSWNSGALTSGVHTFPAVLQSSGLYSLSSVVTVPSSSLGTQTYICNVNHKPSNTKVDKKVEPKSC

SEQ ID NO: 1434 - protein, 220 aa, synthetic construct
EVQLVESGGGLVQPGGSLRLSCAASGFTFSNFGMHWVRQAPGKGLEWVSYISSSSSTIYYADTLKGRFTISRDNSKNTLYLQMNSLRAEDTAVYYCARRGEGAMDYWGQGTTVTVSSASTKGPSVFPLAPSSKSTSGGTAALGCLVKDYFPEPVTVSWNSGALTSGVHTFPAVLQSSGLYSLSSVVTVPSSSLGTQTYICNVNHKPSNTKVDKKVEPKSC

SEQ ID NO: 1435 - protein, 220 aa, synthetic construct
EVQLVESGGGLVQPGGSLRLSCAASGFTFSNFGMHWVRQAPGKGLEWVSYISSWSSTIYYADTLKGRFTISRDNSKNTLYLQMNSLRAEDTAVYYCARRGEGAMDYWGQGTTVTVSSASTKGPSVFPLAPSSKSTSGGTAALGCLVKDYFPEPVTVSWNSGALTSGVHTFPAVLQSSGLYSLSSVVTVPSSSLGTQTYICNVNHKPSNTKVDKKVEPKSC

SEQ ID NO: 1436 - protein, 220 aa, synthetic construct
EVQLVESGGGLVQPGGSLRLSCAASGFTFSNFGMHWVRQAPGKGLEWVSYISSYSSTIYYADTLKGRFTISRDNSKNTLYLQMNSLRAEDTAVYYCARRGEGAMDYWGQGTTVTVSSASTKGPSVFPLAPSSKSTSGGTAALGCLVKDYFPEPVTVSWNSGALTSGVHTFPAVLQSSGLYSLSSVVTVPSSSLGTQTYICNVNHKPSNTKVDKKVEPKSC

SEQ ID NO: 1437 - protein, 220 aa, synthetic construct
EVQLVESGGGLVQPGGSLRLSCAASGFTFSNFGMHWVRQAPGKGLEWVSYISSTSSTIYYADTLKGRFTISRDNSKNTLYLQMNSLRAEDTAVYYCARRGEGAMDYWGQGTTVTVSSASTKGPSVFPLAPSSKSTSGGTAALGCLVKDYFPEPVTVSWNSGALTSGVHTFPAVLQSSGLYSLSSVVTVPSSSLGTQTYICNVNHKPSNTKVDKKVEPKSC

SEQ ID NO: 1438 - protein, 220 aa, synthetic construct
EVQLVESGGGLVQPGGSLRLSCAASGFTFSNFGMHWVRQAPGKGLEWVSYISSGHSTIYYADTLKGRFTISRDNSKNTLYLQMNSLRAEDTAVYYCARRGEGAMDYWGQGTTVTVSSASTKGPSVFPLAPSSKSTSGGTAALGCLVKDYFPEPVTVSWNSGALTSGVHTFPAVLQSSGLYSLSSVVTVPSSSLGTQTYICNVNHKPSNTKVDKKVEPKSC

SEQ ID NO: 1439 - protein, 220 aa, synthetic construct
EVQLVESGGGLVQPGGSLRLSCAASGFTFSNFGMHWVRQAPGKGLEWVSYISSGSSVIYYADTLKGRFTISRDNSKNTLYLQMNSLRAEDTAVYYCARRGEGAMDYWGQGTTVTVSSASTKGPSVFPLAPSSKSTSGGTAALGCLVKDYFPEPVTVSWNSGALTSGVHTFPAVLQSSGLYSLSSVVTVPSSSLGTQTYICNVNHKPSNTKVDKKVEPKSC

SEQ ID NO: 1440 - protein, 220 aa, synthetic construct
EVQLVESGGGLVQPGGSLRLSCAASGFTFSNFGMHWVRQAPGKGLEWVSYISSGSSTFYYADTLKGRFTISRDNSKNTLYLQMNSLRAEDTAVYYCARRGEGAMDYWGQGTTVTVSSASTKGPSVFPLAPSSKSTSGGTAALGCLVKDYFPEPVTVSWNSGALTSGVHTFPAVLQSSGLYSLSSVVTVPSSSLGTQTYICNVNHKPSNTKVDKKVEPKSC

SEQ ID NO: 1441 - protein, 220 aa, synthetic construct
EVQLVESGGGLVQPGGSLRLSCAASGFTFSNFGMHWVRQAPGKGLEWVSYISSGSSTILYADTLKGRFTISRDNSKNTLYLQMNSLRAEDTAVYYCARRGEGAMDYWGQGTTVTVSSASTKGPSVFPLAPSSKSTSGGTAALGCLVKDYFPEPVTVSWNSGALTSGVHTFPAVLQSSGLYSLSSVVTVPSSSLGTQTYICNVNHKPSNTKVDKKVEPKSC

SEQ ID NO: 1442 - protein, 220 aa, synthetic construct
EVQLVESGGGLVQPGGSLRLSCAASGFTFSNFGMHWVRQAPGKGLEWVSYISSGSSTIYYKDTLKGRFTISRDNSKNTLYLQMNSLRAEDTAVYYCARRGEGAMDYWGQGTTVTVSSASTKGPSVFPLAPSSKSTSGGTAALGCLVKDYFPEPVTVSWNSGALTSGVHTFPAVLQSSGLYSLSSVVTVPSSSLGTQTYICNVNHKPSNTKVDKKVEPKSC

SEQ ID NO: 1443 - protein, 220 aa, synthetic construct
EVQLVESGGGLVQPGGSLRLSCAASGFTFSNFGMHWVRQAPGKGLEWVSYISSGSSTIYYRDTLKGRFTISRDNSKNTLYLQMNSLRAEDTAVYYCARRGEGAMDYWGQGTTVTVSSASTKGPSVFPLAPSSKSTSGGTAALGCLVKDYFPEPVTVSWNSGALTSGVHTFPAVLQSSGLYSLSSVVTVPSSSLGTQTYICNVNHKPSNTKVDKKVEPKSC

SEQ ID NO: 1444 - protein, 220 aa, synthetic construct
EVQLVESGGGLVQPGGSLRLSCAASGFTFSNFGMHWVRQAPGKGLEWVSYISSGSSTIYYADKLKGRFTISRDNSKNTLYLQMNSLRAEDTAVYYCARRGEGAMDYWGQGTTVTVSSASTKGPSVFPLAPSSKSTSGGTAALGCLVKDYFPEPVTVSWNSGALTSGVHTFPAVLQSSGLYSLSSVVTVPSSSLGTQTYICNVNHKPSNTKVDKKVEPKSC

SEQ ID NO: 1445 - protein, 220 aa, synthetic construct
EVQLVESGGGLVQPGGSLRLSCAASGFTFSNFGMHWVRQAPGKGLEWVSYISSGSSTIYYADTLKGRFTISRDNSKNTLYLQMNSLRAEDTAVYYCARRGTGAMDYWGQGTTVTVSSASTKGPSVFPLAPSSKSTSGGTAALGCLVKDYFPEPVTVSWNSGALTSGVHTFPAVLQSSGLYSLSSVVTVPSSSLGTQTYICNVNHKPSNTKVDKKVEPKSC

SEQ ID NO: 1446 - protein, 220 aa, synthetic construct
EVQLVESGGGLVQPGGSLRLSCAASGFTFSNFGMHWVRQAPGKGLEWVSYISSGSSTIYYADTLKGRFTISRDNSKNTLYLQMNSLRAEDTAVYYCARRGLGAMDYWGQGTTVTVSSASTKGPSVFPLAPSSKSTSGGTAALGCLVKDYFPEPVTVSWNSGALTSGVHTFPAVLQSSGLYSLSSVVTVPSSSLGTQTYICNVNHKPSNTKVDKKVEPKSC

SEQ ID NO: 1447 - protein, 220 aa, synthetic construct
EVQLVESGGGLVQPGGSLRLSCAASGFTFSNFGMHWVRQAPGKGLEWVSYISSGSSTIYYADTLKGRFTISRDNSKNTLYLQMNSLRAEDTAVYYCARRGHGAMDYWGQGTTVTVSSASTKGPSVFPLAPSSKSTSGGTAALGCLVKDYFPEPVTVSWNSGALTSGVHTFPAVLQSSGLYSLSSVVTVPSSSLGTQTYICNVNHKPSNTKVDKKVEPKSC

SEQ ID NO: 1448 - protein, 220 aa, synthetic construct
EVQLVESGGGLVQPGGSLRLSCAASGFTFSNFGMHWVRQAPGKGLEWVSYISSGSSTIYYADTLKGRFTISRDNSKNTLYLQMNSLRAEDTAVYYCARRGAGAMDYWGQGTTVTVSSASTKGPSVFPLAPSSKSTSGGTAALGCLVKDYFPEPVTVSWNSGALTSGVHTFPAVLQSSGLYSLSSVVTVPSSSLGTQTYICNVNHKPSNTKVDKKVEPKSC

SEQ ID NO: 1449 - protein, 220 aa, synthetic construct
EVQLVESGGGLVQPGGSLRLSCAASGFTFSNFGMHWVRQAPGKGLEWVSYISSGSSTIYYADTLKGRFTISRDNSKNTLYLQMNSLRAEDTAVYYCARRGEGAMDNWGQGTTVTVSSASTKGPSVFPLAPSSKSTSGGTAALGCLVKDYFPEPVTVSWNSGALTSGVHTFPAVLQSSGLYSLSSVVTVPSSSLGTQTYICNVNHKPSNTKVDKKVEPKSC

SEQ ID NO: 1450 - protein, 220 aa, synthetic construct
EVQLVESGGGLVQPGGSLRLSCAASGFTFSNFGMHWVRQAPGKGLEWVSYISSGSSTIYYADTLKGRFTISRDNSKNTLYLQMNSLRAEDTAVYYCARRGEGAMDAWGQGTTVTVSSASTKGPSVFPLAPSSKSTSGGTAALGCLVKDYFPEPVTVSWNSGALTSGVHTFPAVLQSSGLYSLSSVVTVPSSSLGTQTYICNVNHKPSNTKVDKKVEPKSC

SEQ ID NO: 1451 - protein, 220 aa, synthetic construct
EVQLVESGGGLVQPGGSLRLSCAASGFTFSNFGMHWVRQAPGKGLEWVSYISSGSSTIYYADTLKGRFTISRDNSKNTLYLQMNSLRAEDTAVYYCARRGEGAMDWWGQGTTVTVSSASTKGPSVFPLAPSSKSTSGGTAALGCLVKDYFPEPVTVSWNSGALTSGVHTFPAVLQSSGLYSLSSVVTVPSSSLGTQTYICNVNHKPSNTKVDKKVEPKSC

SEQ ID NO: 1452 - protein, 213 aa, synthetic construct
DNQLTQSPSFLSASVGDRVTITCRASSKVNYIYWYQQKPGKAPKLLIYYTSNLAPGVPSRFSGSGSGNEYTLTISSLQPEDFATYYCQQFTSSPFTFGQGTKLEIKRTVAAPSVFIFPPSDEQLKSGTASVVCLLNNFYPREAKVQWKVDNALQSGNSQESVTEQDSKDSTYSLSSTLTLSKADYEKHKVYACEVTHQGLSSPVTKSFNRGEC

SEQ ID NO: 1453 - protein, 213 aa, synthetic construct
DNQLTQSPSFLSASVGDRVTITCRASSSVNYIYWYQQKPGKAPKLLIYYTNNLAPGVPSRFSGSGSGNEYTLTISSLQPEDFATYYCQQFTSSPFTFGQGTKLEIKRTVAAPSVFIFPPSDEQLKSGTASVVCLLNNFYPREAKVQWKVDNALQSGNSQESVTEQDSKDSTYSLSSTLTLSKADYEKHKVYACEVTHQGLSSPVTKSFNRGEC

SEQ ID NO: 1454 - protein, 213 aa, synthetic construct
DNQLTQSPSFLSASVGDRVTITCRASSSVNYIYWYQQKPGKAPKLLIYYTKNLAPGVPSRFSGSGSGNEYTLTISSLQPEDFATYYCQQFTSSPFTFGQGTKLEIKRTVAAPSVFIFPPSDEQLKSGTASVVCLLNNFYPREAKVQWKVDNALQSGNSQESVTEQDSKDSTYSLSSTLTLSKADYEKHKVYACEVTHQGLSSPVTKSFNRGEC

SEQ ID NO: 1455 - protein, 213 aa, synthetic construct
DNQLTQSPSFLSASVGDRVTITCRASSSVNYIYWYQQKPGKAPKLLIYYTSRLAPGVPSRFSGSGSGNEYTLTISSLQPEDFATYYCQQFTSSPFTFGQGTKLEIKRTVAAPSVFIFPPSDEQLKSGTASVVCLLNNFYPREAKVQWKVDNALQSGNSQESVTEQDSKDSTYSLSSTLTLSKADYEKHKVYACEVTHQGLSSPVTKSFNRGEC

SEQ ID NO: 1456 - protein, 213 aa, synthetic construct
DNQLTQSPSFLSASVGDRVTITCRASSSVNYIYWYQQKPGKAPKLLIYYTSKLAPGVPSRFSGSGSGNEYTLTISSLQPEDFATYYCQQFTSSPFTFGQGTKLEIKRTVAAPSVFIFPPSDEQLKSGTASVVCLLNNFYPREAKVQWKVDNALQSGNSQESVTEQDSKDSTYSLSSTLTLSKADYEKHKVYACEVTHQGLSSPVTKSFNRGEC

SEQ ID NO: 1457 - protein, 213 aa, synthetic construct
DNQLTQSPSFLSASVGDRVTITCRASSSVNYIYWYQQKPGKAPKLLIYYTSNLRPGVPSRFSGSGSGNEYTLTISSLQPEDFATYYCQQFTSSPFTFGQGTKLEIKRTVAAPSVFIFPPSDEQLKSGTASVVCLLNNFYPREAKVQWKVDNALQSGNSQESVTEQDSKDSTYSLSSTLTLSKADYEKHKVYACEVTHQGLSSPVTKSFNRGEC

SEQ ID NO: 1458 - protein, 213 aa, synthetic construct
DNQLTQSPSFLSASVGDRVTITCRASSSVNYIYWYQQKPGKAPKLLIYYTSNLARGVPSRFSGSGSGNEYTLTISSLQPEDFATYYCQQFTSSPFTFGQGTKLEIKRTVAAPSVFIFPPSDEQLKSGTASVVCLLNNFYPREAKVQWKVDNALQSGNSQESVTEQDSKDSTYSLSSTLTLSKADYEKHKVYACEVTHQGLSSPVTKSFNRGEC

SEQ ID NO: 1459 - protein, 220 aa, synthetic construct
EVQLVESGGGLVQPGGSLRLSCAASGATFSNFGMHWVRQAPGKGLEWVSYISSGSSTIYYADTLKGRFTISRDNSKNTLYLQMNSLRAEDTAVYYCARRGEGAMDYWGQGTTVTVSSASTKGPSVFPLAPSSKSTSGGTAALGCLVKDYFPEPVTVSWNSGALTSGVHTFPAVLQSSGLYSLSSVVTVPSSSLGTQTYICNVNHKPSNTKVDKKVEPKSC

SEQ ID NO: 1460 - protein, 220 aa, synthetic construct
EVQLVESGGGLVQPGGSLRLSCAASGETFSNFGMHWVRQAPGKGLEWVSYISSGSSTIYYADTLKGRFTISRDNSKNTLYLQMNSLRAEDTAVYYCARRGEGAMDYWGQGTTVTVSSASTKGPSVFPLAPSSKSTSGGTAALGCLVKDYFPEPVTVSWNSGALTSGVHTFPAVLQSSGLYSLSSVVTVPSSSLGTQTYICNVNHKPSNTKVDKKVEPKSC

SEQ ID NO: 1461 - protein, 220 aa, synthetic construct
EVQLVESGGGLVQPGGSLRLSCAASGGTFSNFGMHWVRQAPGKGLEWVSYISSGSSTIYYADTLKGRFTISRDNSKNTLYLQMNSLRAEDTAVYYCARRGEGAMDYWGQGTTVTVSSASTKGPSVFPLAPSSKSTSGGTAALGCLVKDYFPEPVTVSWNSGALTSGVHTFPAVLQSSGLYSLSSVVTVPSSSLGTQTYICNVNHKPSNTKVDKKVEPKSC

SEQ ID NO: 1462 - protein, 220 aa, synthetic construct
EVQLVESGGGLVQPGGSLRLSCAASGHTFSNFGMHWVRQAPGKGLEWVSYISSGSSTIYYADTLKGRFTISRDNSKNTLYLQMNSLRAEDTAVYYCARRGEGAMDYWGQGTTVTVSSASTKGPSVFPLAPSSKSTSGGTAALGCLVKDYFPEPVTVSWNSGALTSGVHTFPAVLQSSGLYSLSSVVTVPSSSLGTQTYICNVNHKPSNTKVDKKVEPKSC

SEQ ID NO: 1463 - protein, 220 aa, synthetic construct
EVQLVESGGGLVQPGGSLRLSCAASGITFSNFGMHWVRQAPGKGLEWVSYISSGSSTIYYADTLKGRFTISRDNSKNTLYLQMNSLRAEDTAVYYCARRGEGAMDYWGQGTTVTVSSASTKGPSVFPLAPSSKSTSGGTAALGCLVKDYFPEPVTVSWNSGALTSGVHTFPAVLQSSGLYSLSSVVTVPSSSLGTQTYICNVNHKPSNTKVDKKVEPKSC

SEQ ID NO: 1464 - protein, 220 aa, synthetic construct
EVQLVESGGGLVQPGGSLRLSCAASGKTFSNFGMHWVRQAPGKGLEWVSYISSGSSTIYYADTLKGRFTISRDNSKNTLYLQMNSLRAEDTAVYYCARRGEGAMDYWGQGTTVTVSSASTKGPSVFPLAPSSKSTSGGTAALGCLVKDYFPEPVTVSWNSGALTSGVHTFPAVLQSSGLYSLSSVVTVPSSSLGTQTYICNVNHKPSNTKVDKKVEPKSC

SEQ ID NO: 1465 - protein, 220 aa, synthetic construct
EVQLVESGGGLVQPGGSLRLSCAASGLTFSNFGMHWVRQAPGKGLEWVSYISSGSSTIYYADTLKGRFTISRDNSKNTLYLQMNSLRAEDTAVYYCARRGEGAMDYWGQGTTVTVSSASTKGPSVFPLAPSSKSTSGGTAALGCLVKDYFPEPVTVSWNSGALTSGVHTFPAVLQSSGLYSLSSVVTVPSSSLGTQTYICNVNHKPSNTKVDKKVEPKSC

SEQ ID NO: 1466 - protein, 220 aa, synthetic construct
EVQLVESGGGLVQPGGSLRLSCAASGMTFSNFGMHWVRQAPGKGLEWVSYISSGSSTIYYADTLKGRFTISRDNSKNTLYLQMNSLRAEDTAVYYCARRGEGAMDYWGQGTTVTVSSASTKGPSVFPLAPSSKSTSGGTAALGCLVKDYFPEPVTVSWNSGALTSGVHTFPAVLQSSGLYSLSSVVTVPSSSLGTQTYICNVNHKPSNTKVDKKVEPKSC

SEQ ID NO: 1467 - protein, 220 aa, synthetic construct
EVQLVESGGGLVQPGGSLRLSCAASGNTFSNFGMHWVRQAPGKGLEWVSYISSGSSTIYYADTLKGRFTISRDNSKNTLYLQMNSLRAEDTAVYYCARRGEGAMDYWGQGTTVTVSSASTKGPSVFPLAPSSKSTSGGTAALGCLVKDYFPEPVTVSWNSGALTSGVHTFPAVLQSSGLYSLSSVVTVPSSSLGTQTYICNVNHKPSNTKVDKKVEPKSC

SEQ ID NO: 1468 - protein, 220 aa, synthetic construct
EVQLVESGGGLVQPGGSLRLSCAASGPTFSNFGMHWVRQAPGKGLEWVSYISSGSSTIYYADTLKGRFTISRDNSKNTLYLQMNSLRAEDTAVYYCARRGEGAMDYWGQGTTVTVSSASTKGPSVFPLAPSSKSTSGGTAALGCLVKDYFPEPVTVSWNSGALTSGVHTFPAVLQSSGLYSLSSVVTVPSSSLGTQTYICNVNHKPSNTKVDKKVEPKSC

SEQ ID NO: 1469 - protein, 220 aa, synthetic construct
EVQLVESGGGLVQPGGSLRLSCAASGQTFSNFGMHWVRQAPGKGLEWVSYISSGSSTIYYADTLKGRFTISRDNSKNTLYLQMNSLRAEDTAVYYCARRGEGAMDYWGQGTTVTVSSASTKGPSVFPLAPSSKSTSGGTAALGCLVKDYFPEPVTVSWNSGALTSGVHTFPAVLQSSGLYSLSSVVTVPSSSLGTQTYICNVNHKPSNTKVDKKVEPKSC

SEQ ID NO: 1470 - protein, 220 aa, synthetic construct
EVQLVESGGGLVQPGGSLRLSCAASGRTFSNFGMHWVRQAPGKGLEWVSYISSGSSTIYYADTLKGRFTISRDNSKNTLYLQMNSLRAEDTAVYYCARRGEGAMDYWGQGTTVTVSSASTKGPSVFPLAPSSKSTSGGTAALGCLVKDYFPEPVTVSWNSGALTSGVHTFPAVLQSSGLYSLSSVVTVPSSSLGTQTYICNVNHKPSNTKVDKKVEPKSC

SEQ ID NO: 1471 - protein, 220 aa, synthetic construct
EVQLVESGGGLVQPGGSLRLSCAASGSTFSNFGMHWVRQAPGKGLEWVSYISSGSSTIYYADTLKGRFTISRDNSKNTLYLQMNSLRAEDTAVYYCARRGEGAMDYWGQGTTVTVSSASTKGPSVFPLAPSSKSTSGGTAALGCLVKDYFPEPVTVSWNSGALTSGVHTFPAVLQSSGLYSLSSVVTVPSSSLGTQTYICNVNHKPSNTKVDKKVEPKSC

SEQ ID NO: 1472 - protein, 220 aa, synthetic construct
EVQLVESGGGLVQPGGSLRLSCAASGTTFSNFGMHWVRQAPGKGLEWVSYISSGSSTIYYADTLKGRFTISRDNSKNTLYLQMNSLRAEDTAVYYCARRGEGAMDYWGQGTTVTVSSASTKGPSVFPLAPSSKSTSGGTAALGCLVKDYFPEPVTVSWNSGALTSGVHTFPAVLQSSGLYSLSSVVTVPSSSLGTQTYICNVNHKPSNTKVDKKVEPKSC

SEQ ID NO: 1473 - protein, 220 aa, synthetic construct
EVQLVESGGGLVQPGGSLRLSCAASGVTFSNFGMHWVRQAPGKGLEWVSYISSGSSTIYYADTLKGRFTISRDNSKNTLYLQMNSLRAEDTAVYYCARRGEGAMDYWGQGTTVTVSSASTKGPSVFPLAPSSKSTSGGTAALGCLVKDYFPEPVTVSWNSGALTSGVHTFPAVLQSSGLYSLSSVVTVPSSSLGTQTYICNVNHKPSNTKVDKKVEPKSC

SEQ ID NO: 1474 - protein, 220 aa, synthetic construct
EVQLVESGGGLVQPGGSLRLSCAASGWTFSNFGMHWVRQAPGKGLEWVSYISSGSSTIYYADTLKGRFTISRDNSKNTLYLQMNSLRAEDTAVYYCARRGEGAMDYWGQGTTVTVSSASTKGPSVFPLAPSSKSTSGGTAALGCLVKDYFPEPVTVSWNSGALTSGVHTFPAVLQSSGLYSLSSVVTVPSSSLGTQTYICNVNHKPSNTKVDKKVEPKSC

SEQ ID NO: 1475 - protein, 220 aa, synthetic construct
EVQLVESGGGLVQPGGSLRLSCAASGYTFSNFGMHWVRQAPGKGLEWVSYISSGSSTIYYADTLKGRFTISRDNSKNTLYLQMNSLRAEDTAVYYCARRGEGAMDYWGQGTTVTVSSASTKGPSVFPLAPSSKSTSGGTAALGCLVKDYFPEPVTVSWNSGALTSGVHTFPAVLQSSGLYSLSSVVTVPSSSLGTQTYICNVNHKPSNTKVDKKVEPKSC

SEQ ID NO: 1476 - protein, 220 aa, synthetic construct
EVQLVESGGGLVQPGGSLRLSCAASGFAFSNFGMHWVRQAPGKGLEWVSYISSGSSTIYYADTLKGRFTISRDNSKNTLYLQMNSLRAEDTAVYYCARRGEGAMDYWGQGTTVTVSSASTKGPSVFPLAPSSKSTSGGTAALGCLVKDYFPEPVTVSWNSGALTSGVHTFPAVLQSSGLYSLSSVVTVPSSSLGTQTYICNVNHKPSNTKVDKKVEPKSC

SEQ ID NO: 1477 - protein, 220 aa, synthetic construct
EVQLVESGGGLVQPGGSLRLSCAASGFDFSNFGMHWVRQAPGKGLEWVSYISSGSSTIYYADTLKGRFTISRDNSKNTLYLQMNSLRAEDTAVYYCARRGEGAMDYWGQGTTVTVSSASTKGPSVFPLAPSSKSTSGGTAALGCLVKDYFPEPVTVSWNSGALTSGVHTFPAVLQSSGLYSLSSVVTVPSSSLGTQTYICNVNHKPSNTKVDKKVEPKSC

SEQ ID NO: 1478 - protein, 220 aa, synthetic construct
EVQLVESGGGLVQPGGSLRLSCAASGFEFSNFGMHWVRQAPGKGLEWVSYISSGSSTIYYADTLKGRFTISRDNSKNTLYLQMNSLRAEDTAVYYCARRGEGAMDYWGQGTTVTVSSASTKGPSVFPLAPSSKSTSGGTAALGCLVKDYFPEPVTVSWNSGALTSGVHTFPAVLQSSGLYSLSSVVTVPSSSLGTQTYICNVNHKPSNTKVDKKVEPKSC

SEQ ID NO: 1479 - protein, 220 aa, synthetic construct
EVQLVESGGGLVQPGGSLRLSCAASGFFFSNFGMHWVRQAPGKGLEWVSYISSGSSTIYYADTLKGRFTISRDNSKNTLYLQMNSLRAEDTAVYYCARRGEGAMDYWGQGTTVTVSSASTKGPSVFPLAPSSKSTSGGTAALGCLVKDYFPEPVTVSWNSGALTSGVHTFPAVLQSSGLYSLSSVVTVPSSSLGTQTYICNVNHKPSNTKVDKKVEPKSC

SEQ ID NO: 1480 - protein, 220 aa, synthetic construct
EVQLVESGGGLVQPGGSLRLSCAASGFGFSNFGMHWVRQAPGKGLEWVSYISSGSSTIYYADTLKGRFTISRDNSKNTLYLQMNSLRAEDTAVYYCARRGEGAMDYWGQGTTVTVSSASTKGPSVFPLAPSSKSTSGGTAALGCLVKDYFPEPVTVSWNSGALTSGVHTFPAVLQSSGLYSLSSVVTVPSSSLGTQTYICNVNHKPSNTKVDKKVEPKSC

SEQ ID NO: 1481 - protein, 220 aa, synthetic construct
EVQLVESGGGLVQPGGSLRLSCAASGFHFSNFGMHWVRQAPGKGLEWVSYISSGSSTIYYADTLKGRFTISRDNSKNTLYLQMNSLRAEDTAVYYCARRGEGAMDYWGQGTTVTVSSASTKGPSVFPLAPSSKSTSGGTAALGCLVKDYFPEPVTVSWNSGALTSGVHTFPAVLQSSGLYSLSSVVTVPSSSLGTQTYICNVNHKPSNTKVDKKVEPKSC

SEQ ID NO: 1482 - protein, 220 aa, synthetic construct
EVQLVESGGGLVQPGGSLRLSCAASGFIFSNFGMHWVRQAPGKGLEWVSYISSGSSTIYYADTLKGRFTISRDNSKNTLYLQMNSLRAEDTAVYYCARRGEGAMDYWGQGTTVTVSSASTKGPSVFPLAPSSKSTSGGTAALGCLVKDYFPEPVTVSWNSGALTSGVHTFPAVLQSSGLYSLSSVVTVPSSSLGTQTYICNVNHKPSNTKVDKKVEPKSC

SEQ ID NO: 1483 - protein, 220 aa, synthetic construct
EVQLVESGGGLVQPGGSLRLSCAASGFKFSNFGMHWVRQAPGKGLEWVSYISSGSSTIYYADTLKGRFTISRDNSKNTLYLQMNSLRAEDTAVYYCARRGEGAMDYWGQGTTVTVSSASTKGPSVFPLAPSSKSTSGGTAALGCLVKDYFPEPVTVSWNSGALTSGVHTFPAVLQSSGLYSLSSVVTVPSSSLGTQTYICNVNHKPSNTKVDKKVEPKSC

SEQ ID NO: 1484 - protein, 220 aa, synthetic construct
EVQLVESGGGLVQPGGSLRLSCAASGFLFSNFGMHWVRQAPGKGLEWVSYISSGSSTIYYADTLKGRFTISRDNSKNTLYLQMNSLRAEDTAVYYCARRGEGAMDYWGQGTTVTVSSASTKGPSVFPLAPSSKSTSGGTAALGCLVKDYFPEPVTVSWNSGALTSGVHTFPAVLQSSGLYSLSSVVTVPSSSLGTQTYICNVNHKPSNTKVDKKVEPKSC

SEQ ID NO: 1485 - protein, 220 aa, synthetic construct
EVQLVESGGGLVQPGGSLRLSCAASGFMFSNFGMHWVRQAPGKGLEWVSYISSGSSTIYYADTLKGRFTISRDNSKNTLYLQMNSLRAEDTAVYYCARRGEGAMDYWGQGTTVTVSSASTKGPSVFPLAPSSKSTSGGTAALGCLVKDYFPEPVTVSWNSGALTSGVHTFPAVLQSSGLYSLSSVVTVPSSSLGTQTYICNVNHKPSNTKVDKKVEPKSC

SEQ ID NO: 1486 - protein, 220 aa, synthetic construct
EVQLVESGGGLVQPGGSLRLSCAASGFNFSNFGMHWVRQAPGKGLEWVSYISSGSSTIYYADTLKGRFTISRDNSKNTLYLQMNSLRAEDTAVYYCARRGEGAMDYWGQGTTVTVSSASTKGPSVFPLAPSSKSTSGGTAALGCLVKDYFPEPVTVSWNSGALTSGVHTFPAVLQSSGLYSLSSVVTVPSSSLGTQTYICNVNHKPSNTKVDKKVEPKSC

SEQ ID NO: 1487 - protein, 220 aa, synthetic construct
EVQLVESGGGLVQPGGSLRLSCAASGFQFSNFGMHWVRQAPGKGLEWVSYISSGSSTIYYADTLKGRFTISRDNSKNTLYLQMNSLRAEDTAVYYCARRGEGAMDYWGQGTTVTVSSASTKGPSVFPLAPSSKSTSGGTAALGCLVKDYFPEPVTVSWNSGALTSGVHTFPAVLQSSGLYSLSSVVTVPSSSLGTQTYICNVNHKPSNTKVDKKVEPKSC

SEQ ID NO: 1488 - protein, 220 aa, synthetic construct
EVQLVESGGGLVQPGGSLRLSCAASGFRFSNFGMHWVRQAPGKGLEWVSYISSGSSTIYYADTLKGRFTISRDNSKNTLYLQMNSLRAEDTAVYYCARRGEGAMDYWGQGTTVTVSSASTKGPSVFPLAPSSKSTSGGTAALGCLVKDYFPEPVTVSWNSGALTSGVHTFPAVLQSSGLYSLSSVVTVPSSSLGTQTYICNVNHKPSNTKVDKKVEPKSC

SEQ ID NO: 1489 - protein, 220 aa, synthetic construct
EVQLVESGGGLVQPGGSLRLSCAASGFSFSNFGMHWVRQAPGKGLEWVSYISSGSSTIYYADTLKGRFTISRDNSKNTLYLQMNSLRAEDTAVYYCARRGEGAMDYWGQGTTVTVSSASTKGPSVFPLAPSSKSTSGGTAALGCLVKDYFPEPVTVSWNSGALTSGVHTFPAVLQSSGLYSLSSVVTVPSSSLGTQTYICNVNHKPSNTKVDKKVEPKSC

SEQ ID NO: 1490 - protein, 220 aa, synthetic construct
EVQLVESGGGLVQPGGSLRLSCAASGFVFSNFGMHWVRQAPGKGLEWVSYISSGSSTIYYADTLKGRFTISRDNSKNTLYLQMNSLRAEDTAVYYCARRGEGAMDYWGQGTTVTVSSASTKGPSVFPLAPSSKSTSGGTAALGCLVKDYFPEPVTVSWNSGALTSGVHTFPAVLQSSGLYSLSSVVTVPSSSLGTQTYICNVNHKPSNTKVDKKVEPKSC

SEQ ID NO: 1491 - protein, 220 aa, synthetic construct
EVQLVESGGGLVQPGGSLRLSCAASGFWFSNFGMHWVRQAPGKGLEWVSYISSGSSTIYYADTLKGRFTISRDNSKNTLYLQMNSLRAEDTAVYYCARRGEGAMDYWGQGTTVTVSSASTKGPSVFPLAPSSKSTSGGTAALGCLVKDYFPEPVTVSWNSGALTSGVHTFPAVLQSSGLYSLSSVVTVPSSSLGTQTYICNVNHKPSNTKVDKKVEPKSC

SEQ ID NO: 1492 - protein, 220 aa, synthetic construct
EVQLVESGGGLVQPGGSLRLSCAASGFYFSNFGMHWVRQAPGKGLEWVSYISSGSSTIYYADTLKGRFTISRDNSKNTLYLQMNSLRAEDTAVYYCARRGEGAMDYWGQGTTVTVSSASTKGPSVFPLAPSSKSTSGGTAALGCLVKDYFPEPVTVSWNSGALTSGVHTFPAVLQSSGLYSLSSVVTVPSSSLGTQTYICNVNHKPSNTKVDKKVEPKSC

SEQ ID NO: 1493 - protein, 220 aa, synthetic construct
EVQLVESGGGLVQPGGSLRLSCAASGFTASNFGMHWVRQAPGKGLEWVSYISSGSSTIYYADTLKGRFTISRDNSKNTLYLQMNSLRAEDTAVYYCARRGEGAMDYWGQGTTVTVSSASTKGPSVFPLAPSSKSTSGGTAALGCLVKDYFPEPVTVSWNSGALTSGVHTFPAVLQSSGLYSLSSVVTVPSSSLGTQTYICNVNHKPSNTKVDKKVEPKSC

SEQ ID NO: 1494 - protein, 220 aa, synthetic construct
EVQLVESGGGLVQPGGSLRLSCAASGFTDSNFGMHWVRQAPGKGLEWVSYISSGSSTIYYADTLKGRFTISRDNSKNTLYLQMNSLRAEDTAVYYCARRGEGAMDYWGQGTTVTVSSASTKGPSVFPLAPSSKSTSGGTAALGCLVKDYFPEPVTVSWNSGALTSGVHTFPAVLQSSGLYSLSSVVTVPSSSLGTQTYICNVNHKPSNTKVDKKVEPKSC

SEQ ID NO: 1495 - protein, 220 aa, synthetic construct
EVQLVESGGGLVQPGGSLRLSCAASGFTESNFGMHWVRQAPGKGLEWVSYISSGSSTIYYADTLKGRFTISRDNSKNTLYLQMNSLRAEDTAVYYCARRGEGAMDYWGQGTTVTVSSASTKGPSVFPLAPSSKSTSGGTAALGCLVKDYFPEPVTVSWNSGALTSGVHTFPAVLQSSGLYSLSSVVTVPSSSLGTQTYICNVNHKPSNTKVDKKVEPKSC

SEQ ID NO: 1496 - protein, 220 aa, synthetic construct
EVQLVESGGGLVQPGGSLRLSCAASGFTGSNFGMHWVRQAPGKGLEWVSYISSGSSTIYYADTLKGRFTISRDNSKNTLYLQMNSLRAEDTAVYYCARRGEGAMDYWGQGTTVTVSSASTKGPSVFPLAPSSKSTSGGTAALGCLVKDYFPEPVTVSWNSGALTSGVHTFPAVLQSSGLYSLSSVVTVPSSSLGTQTYICNVNHKPSNTKVDKKVEPKSC

SEQ ID NO: 1497 - protein, 220 aa, synthetic construct
EVQLVESGGGLVQPGGSLRLSCAASGFTHSNFGMHWVRQAPGKGLEWVSYISSGSSTIYYADTLKGRFTISRDNSKNTLYLQMNSLRAEDTAVYYCARRGEGAMDYWGQGTTVTVSSASTKGPSVFPLAPSSKSTSGGTAALGCLVKDYFPEPVTVSWNSGALTSGVHTFPAVLQSSGLYSLSSVVTVPSSSLGTQTYICNVNHKPSNTKVDKKVEPKSC

SEQ ID NO: 1498 - protein, 220 aa, synthetic construct
EVQLVESGGGLVQPGGSLRLSCAASGFTISNFGMHWVRQAPGKGLEWVSYISSGSSTIYYADTLKGRFTISRDNSKNTLYLQMNSLRAEDTAVYYCARRGEGAMDYWGQGTTVTVSSASTKGPSVFPLAPSSKSTSGGTAALGCLVKDYFPEPVTVSWNSGALTSGVHTFPAVLQSSGLYSLSSVVTVPSSSLGTQTYICNVNHKPSNTKVDKKVEPKSC

SEQ ID NO: 1499 - protein, 220 aa, synthetic construct
EVQLVESGGGLVQPGGSLRLSCAASGFTKSNFGMHWVRQAPGKGLEWVSYISSGSSTIYYADTLKGRFTISRDNSKNTLYLQMNSLRAEDTAVYYCARRGEGAMDYWGQGTTVTVSSASTKGPSVFPLAPSSKSTSGGTAALGCLVKDYFPEPVTVSWNSGALTSGVHTFPAVLQSSGLYSLSSVVTVPSSSLGTQTYICNVNHKPSNTKVDKKVEPKSC

SEQ ID NO: 1500 - protein, 220 aa, synthetic construct
EVQLVESGGGLVQPGGSLRLSCAASGFTLSNFGMHWVRQAPGKGLEWVSYISSGSSTIYYADTLKGRFTISRDNSKNTLYLQMNSLRAEDTAVYYCARRGEGAMDYWGQGTTVTVSSASTKGPSVFPLAPSSKSTSGGTAALGCLVKDYFPEPVTVSWNSGALTSGVHTFPAVLQSSGLYSLSSVVTVPSSSLGTQTYICNVNHKPSNTKVDKKVEPKSC

SEQ ID NO: 1501 - protein, 220 aa, synthetic construct
EVQLVESGGGLVQPGGSLRLSCAASGFTMSNFGMHWVRQAPGKGLEWVSYISSGSSTIYYADTLKGRFTISRDNSKNTLYLQMNSLRAEDTAVYYCARRGEGAMDYWGQGTTVTVSSASTKGPSVFPLAPSSKSTSGGTAALGCLVKDYFPEPVTVSWNSGALTSGVHTFPAVLQSSGLYSLSSVVTVPSSSLGTQTYICNVNHKPSNTKVDKKVEPKSC

SEQ ID NO: 1502 - protein, 220 aa, synthetic construct
EVQLVESGGGLVQPGGSLRLSCAASGFTNSNFGMHWVRQAPGKGLEWVSYISSGSSTIYYADTLKGRFTISRDNSKNTLYLQMNSLRAEDTAVYYCARRGEGAMDYWGQGTTVTVSSASTKGPSVFPLAPSSKSTSGGTAALGCLVKDYFPEPVTVSWNSGALTSGVHTFPAVLQSSGLYSLSSVVTVPSSSLGTQTYICNVNHKPSNTKVDKKVEPKSC

SEQ ID NO: 1503 - protein, 220 aa, synthetic construct
EVQLVESGGGLVQPGGSLRLSCAASGFTPSNFGMHWVRQAPGKGLEWVSYISSGSSTIYYADTLKGRFTISRDNSKNTLYLQMNSLRAEDTAVYYCARRGEGAMDYWGQGTTVTVSSASTKGPSVFPLAPSSKSTSGGTAALGCLVKDYFPEPVTVSWNSGALTSGVHTFPAVLQSSGLYSLSSVVTVPSSSLGTQTYICNVNHKPSNTKVDKKVEPKSC

SEQ ID NO: 1504 - protein, 220 aa, synthetic construct
EVQLVESGGGLVQPGGSLRLSCAASGFTQSNFGMHWVRQAPGKGLEWVSYISSGSSTIYYADTLKGRFTISRDNSKNTLYLQMNSLRAEDTAVYYCARRGEGAMDYWGQGTTVTVSSASTKGPSVFPLAPSSKSTSGGTAALGCLVKDYFPEPVTVSWNSGALTSGVHTFPAVLQSSGLYSLSSVVTVPSSSLGTQTYICNVNHKPSNTKVDKKVEPKSC

SEQ ID NO: 1505 - protein, 220 aa, synthetic construct
EVQLVESGGGLVQPGGSLRLSCAASGFTRSNFGMHWVRQAPGKGLEWVSYISSGSSTIYYADTLKGRFTISRDNSKNTLYLQMNSLRAEDTAVYYCARRGEGAMDYWGQGTTVTVSSASTKGPSVFPLAPSSKSTSGGTAALGCLVKDYFPEPVTVSWNSGALTSGVHTFPAVLQSSGLYSLSSVVTVPSSSLGTQTYICNVNHKPSNTKVDKKVEPKSC

SEQ ID NO: 1506 - protein, 220 aa, synthetic construct
EVQLVESGGGLVQPGGSLRLSCAASGFTSSNFGMHWVRQAPGKGLEWVSYISSGSSTIYYADTLKGRFTISRDNSKNTLYLQMNSLRAEDTAVYYCARRGEGAMDYWGQGTTVTVSSASTKGPSVFPLAPSSKSTSGGTAALGCLVKDYFPEPVTVSWNSGALTSGVHTFPAVLQSSGLYSLSSVVTVPSSSLGTQTYICNVNHKPSNTKVDKKVEPKSC

SEQ ID NO: 1507 - protein, 220 aa, synthetic construct
EVQLVESGGGLVQPGGSLRLSCAASGFTTSNFGMHWVRQAPGKGLEWVSYISSGSSTIYYADTLKGRFTISRDNSKNTLYLQMNSLRAEDTAVYYCARRGEGAMDYWGQGTTVTVSSASTKGPSVFPLAPSSKSTSGGTAALGCLVKDYFPEPVTVSWNSGALTSGVHTFPAVLQSSGLYSLSSVVTVPSSSLGTQTYICNVNHKPSNTKVDKKVEPKSC

SEQ ID NO: 1508 - protein, 220 aa, synthetic construct
EVQLVESGGGLVQPGGSLRLSCAASGFTVSNFGMHWVRQAPGKGLEWVSYISSGSSTIYYADTLKGRFTISRDNSKNTLYLQMNSLRAEDTAVYYCARRGEGAMDYWGQGTTVTVSSASTKGPSVFPLAPSSKSTSGGTAALGCLVKDYFPEPVTVSWNSGALTSGVHTFPAVLQSSGLYSLSSVVTVPSSSLGTQTYICNVNHKPSNTKVDKKVEPKSC

SEQ ID NO: 1509 - protein, 220 aa, synthetic construct
EVQLVESGGGLVQPGGSLRLSCAASGFTWSNFGMHWVRQAPGKGLEWVSYISSGSSTIYYADTLKGRFTISRDNSKNTLYLQMNSLRAEDTAVYYCARRGEGAMDYWGQGTTVTVSSASTKGPSVFPLAPSSKSTSGGTAALGCLVKDYFPEPVTVSWNSGALTSGVHTFPAVLQSSGLYSLSSVVTVPSSSLGTQTYICNVNHKPSNTKVDKKVEPKSC

SEQ ID NO: 1510 - protein, 220 aa, synthetic construct
EVQLVESGGGLVQPGGSLRLSCAASGFTYSNFGMHWVRQAPGKGLEWVSYISSGSSTIYYADTLKGRFTISRDNSKNTLYLQMNSLRAEDTAVYYCARRGEGAMDYWGQGTTVTVSSASTKGPSVFPLAPSSKSTSGGTAALGCLVKDYFPEPVTVSWNSGALTSGVHTFPAVLQSSGLYSLSSVVTVPSSSLGTQTYICNVNHKPSNTKVDKKVEPKSC

SEQ ID NO: 1511 - protein, 220 aa, synthetic construct
EVQLVESGGGLVQPGGSLRLSCAASGFTFDNFGMHWVRQAPGKGLEWVSYISSGSSTIYYADTLKGRFTISRDNSKNTLYLQMNSLRAEDTAVYYCARRGEGAMDYWGQGTTVTVSSASTKGPSVFPLAPSSKSTSGGTAALGCLVKDYFPEPVTVSWNSGALTSGVHTFPAVLQSSGLYSLSSVVTVPSSSLGTQTYICNVNHKPSNTKVDKKVEPKSC

SEQ ID NO: 1512 - protein, 220 aa, synthetic construct
EVQLVESGGGLVQPGGSLRLSCAASGFTFENFGMHWVRQAPGKGLEWVSYISSGSSTIYYADTLKGRFTISRDNSKNTLYLQMNSLRAEDTAVYYCARRGEGAMDYWGQGTTVTVSSASTKGPSVFPLAPSSKSTSGGTAALGCLVKDYFPEPVTVSWNSGALTSGVHTFPAVLQSSGLYSLSSVVTVPSSSLGTQTYICNVNHKPSNTKVDKKVEPKSC

SEQ ID NO: 1513 - protein, 220 aa, synthetic construct
EVQLVESGGGLVQPGGSLRLSCAASGFTFFNFGMHWVRQAPGKGLEWVSYISSGSSTIYYADTLKGRFTISRDNSKNTLYLQMNSLRAEDTAVYYCARRGEGAMDYWGQGTTVTVSSASTKGPSVFPLAPSSKSTSGGTAALGCLVKDYFPEPVTVSWNSGALTSGVHTFPAVLQSSGLYSLSSVVTVPSSSLGTQTYICNVNHKPSNTKVDKKVEPKSC

SEQ ID NO: 1514 - protein, 220 aa, synthetic construct
EVQLVESGGGLVQPGGSLRLSCAASGFTFGNFGMHWVRQAPGKGLEWVSYISSGSSTIYYADTLKGRFTISRDNSKNTLYLQMNSLRAEDTAVYYCARRGEGAMDYWGQGTTVTVSSASTKGPSVFPLAPSSKSTSGGTAALGCLVKDYFPEPVTVSWNSGALTSGVHTFPAVLQSSGLYSLSSVVTVPSSSLGTQTYICNVNHKPSNTKVDKKVEPKSC

SEQ ID NO: 1515 - protein, 220 aa, synthetic construct
EVQLVESGGGLVQPGGSLRLSCAASGFTFHNFGMHWVRQAPGKGLEWVSYISSGSSTIYYADTLKGRFTISRDNSKNTLYLQMNSLRAEDTAVYYCARRGEGAMDYWGQGTTVTVSSASTKGPSVFPLAPSSKSTSGGTAALGCLVKDYFPEPVTVSWNSGALTSGVHTFPAVLQSSGLYSLSSVVTVPSSSLGTQTYICNVNHKPSNTKVDKKVEPKSC

SEQ ID NO: 1516 - protein, 220 aa, synthetic construct
EVQLVESGGGLVQPGGSLRLSCAASGFTFINFGMHWVRQAPGKGLEWVSYISSGSSTIYYADTLKGRFTISRDNSKNTLYLQMNSLRAEDTAVYYCARRGEGAMDYWGQGTTVTVSSASTKGPSVFPLAPSSKSTSGGTAALGCLVKDYFPEPVTVSWNSGALTSGVHTFPAVLQSSGLYSLSSVVTVPSSSLGTQTYICNVNHKPSNTKVDKKVEPKSC

SEQ ID NO: 1517 - protein, 220 aa, synthetic construct
EVQLVESGGGLVQPGGSLRLSCAASGFTFKNFGMHWVRQAPGKGLEWVSYISSGSSTIYYADTLKGRFTISRDNSKNTLYLQMNSLRAEDTAVYYCARRGEGAMDYWGQGTTVTVSSASTKGPSVFPLAPSSKSTSGGTAALGCLVKDYFPEPVTVSWNSGALTSGVHTFPAVLQSSGLYSLSSVVTVPSSSLGTQTYICNVNHKPSNTKVDKKVEPKSC

SEQ ID NO: 1518 - protein, 220 aa, synthetic construct
EVQLVESGGGLVQPGGSLRLSCAASGFTFLNFGMHWVRQAPGKGLEWVSYISSGSSTIYYADTLKGRFTISRDNSKNTLYLQMNSLRAEDTAVYYCARRGEGAMDYWGQGTTVTVSSASTKGPSVFPLAPSSKSTSGGTAALGCLVKDYFPEPVTVSWNSGALTSGVHTFPAVLQSSGLYSLSSVVTVPSSSLGTQTYICNVNHKPSNTKVDKKVEPKSC

SEQ ID NO: 1519 - protein, 220 aa, synthetic construct
EVQLVESGGGLVQPGGSLRLSCAASGFTFMNFGMHWVRQAPGKGLEWVSYISSGSSTIYYADTLKGRFTISRDNSKNTLYLQMNSLRAEDTAVYYCARRGEGAMDYWGQGTTVTVSSASTKGPSVFPLAPSSKSTSGGTAALGCLVKDYFPEPVTVSWNSGALTSGVHTFPAVLQSSGLYSLSSVVTVPSSSLGTQTYICNVNHKPSNTKVDKKVEPKSC

SEQ ID NO: 1520 - protein, 220 aa, synthetic construct
EVQLVESGGGLVQPGGSLRLSCAASGFTFNNFGMHWVRQAPGKGLEWVSYISSGSSTIYYADTLKGRFTISRDNSKNTLYLQMNSLRAEDTAVYYCARRGEGAMDYWGQGTTVTVSSASTKGPSVFPLAPSSKSTSGGTAALGCLVKDYFPEPVTVSWNSGALTSGVHTFPAVLQSSGLYSLSSVVTVPSSSLGTQTYICNVNHKPSNTKVDKKVEPKSC

SEQ ID NO: 1521 - protein, 220 aa, synthetic construct
EVQLVESGGGLVQPGGSLRLSCAASGFTFPNFGMHWVRQAPGKGLEWVSYISSGSSTIYYADTLKGRFTISRDNSKNTLYLQMNSLRAEDTAVYYCARRGEGAMDYWGQGTTVTVSSASTKGPSVFPLAPSSKSTSGGTAALGCLVKDYFPEPVTVSWNSGALTSGVHTFPAVLQSSGLYSLSSVVTVPSSSLGTQTYICNVNHKPSNTKVDKKVEPKSC

SEQ ID NO: 1522 - protein, 220 aa, synthetic construct
EVQLVESGGGLVQPGGSLRLSCAASGFTFQNFGMHWVRQAPGKGLEWVSYISSGSSTIYYADTLKGRFTISRDNSKNTLYLQMNSLRAEDTAVYYCARRGEGAMDYWGQGTTVTVSSASTKGPSVFPLAPSSKSTSGGTAALGCLVKDYFPEPVTVSWNSGALTSGVHTFPAVLQSSGLYSLSSVVTVPSSSLGTQTYICNVNHKPSNTKVDKKVEPKSC

SEQ ID NO: 1523 - protein, 220 aa, synthetic construct
EVQLVESGGGLVQPGGSLRLSCAASGFTFRNFGMHWVRQAPGKGLEWVSYISSGSSTIYYADTLKGRFTISRDNSKNTLYLQMNSLRAEDTAVYYCARRGEGAMDYWGQGTTVTVSSASTKGPSVFPLAPSSKSTSGGTAALGCLVKDYFPEPVTVSWNSGALTSGVHTFPAVLQSSGLYSLSSVVTVPSSSLGTQTYICNVNHKPSNTKVDKKVEPKSC

SEQ ID NO: 1524 - protein, 220 aa, synthetic construct
EVQLVESGGGLVQPGGSLRLSCAASGFTFVNFGMHWVRQAPGKGLEWVSYISSGSSTIYYADTLKGRFTISRDNSKNTLYLQMNSLRAEDTAVYYCARRGEGAMDYWGQGTTVTVSSASTKGPSVFPLAPSSKSTSGGTAALGCLVKDYFPEPVTVSWNSGALTSGVHTFPAVLQSSGLYSLSSVVTVPSSSLGTQTYICNVNHKPSNTKVDKKVEPKSC

SEQ ID NO: 1525 - protein, 220 aa, synthetic construct
EVQLVESGGGLVQPGGSLRLSCAASGFTFWNFGMHWVRQAPGKGLEWVSYISSGSSTIYYADTLKGRFTISRDNSKNTLYLQMNSLRAEDTAVYYCARRGEGAMDYWGQGTTVTVSSASTKGPSVFPLAPSSKSTSGGTAALGCLVKDYFPEPVTVSWNSGALTSGVHTFPAVLQSSGLYSLSSVVTVPSSSLGTQTYICNVNHKPSNTKVDKKVEPKSC

SEQ ID NO: 1526 - protein, 220 aa, synthetic construct
EVQLVESGGGLVQPGGSLRLSCAASGFTFYNFGMHWVRQAPGKGLEWVSYISSGSSTIYYADTLKGRFTISRDNSKNTLYLQMNSLRAEDTAVYYCARRGEGAMDYWGQGTTVTVSSASTKGPSVFPLAPSSKSTSGGTAALGCLVKDYFPEPVTVSWNSGALTSGVHTFPAVLQSSGLYSLSSVVTVPSSSLGTQTYICNVNHKPSNTKVDKKVEPKSC

SEQ ID NO: 1527 - protein, 220 aa, synthetic construct
EVQLVESGGGLVQPGGSLRLSCAASGFTFSAFGMHWVRQAPGKGLEWVSYISSGSSTIYYADTLKGRFTISRDNSKNTLYLQMNSLRAEDTAVYYCARRGEGAMDYWGQGTTVTVSSASTKGPSVFPLAPSSKSTSGGTAALGCLVKDYFPEPVTVSWNSGALTSGVHTFPAVLQSSGLYSLSSVVTVPSSSLGTQTYICNVNHKPSNTKVDKKVEPKSC

SEQ ID NO: 1528 - protein, 220 aa, synthetic construct
EVQLVESGGGLVQPGGSLRLSCAASGFTFSDFGMHWVRQAPGKGLEWVSYISSGSSTIYYADTLKGRFTISRDNSKNTLYLQMNSLRAEDTAVYYCARRGEGAMDYWGQGTTVTVSSASTKGPSVFPLAPSSKSTSGGTAALGCLVKDYFPEPVTVSWNSGALTSGVHTFPAVLQSSGLYSLSSVVTVPSSSLGTQTYICNVNHKPSNTKVDKKVEPKSC

SEQ ID NO: 1529 - protein, 220 aa, synthetic construct
EVQLVESGGGLVQPGGSLRLSCAASGFTFSEFGMHWVRQAPGKGLEWVSYISSGSSTIYYADTLKGRFTISRDNSKNTLYLQMNSLRAEDTAVYYCARRGEGAMDYWGQGTTVTVSSASTKGPSVFPLAPSSKSTSGGTAALGCLVKDYFPEPVTVSWNSGALTSGVHTFPAVLQSSGLYSLSSVVTVPSSSLGTQTYICNVNHKPSNTKVDKKVEPKSC

SEQ ID NO: 1530 - protein, 220 aa, synthetic construct
EVQLVESGGGLVQPGGSLRLSCAASGFTFSFFGMHWVRQAPGKGLEWVSYISSGSSTIYYADTLKGRFTISRDNSKNTLYLQMNSLRAEDTAVYYCARRGEGAMDYWGQGTTVTVSSASTKGPSVFPLAPSSKSTSGGTAALGCLVKDYFPEPVTVSWNSGALTSGVHTFPAVLQSSGLYSLSSVVTVPSSSLGTQTYICNVNHKPSNTKVDKKVEPKSC

SEQ ID NO: 1531 - protein, 220 aa, synthetic construct
EVQLVESGGGLVQPGGSLRLSCAASGFTFSGFGMHWVRQAPGKGLEWVSYISSGSSTIYYADTLKGRFTISRDNSKNTLYLQMNSLRAEDTAVYYCARRGEGAMDYWGQGTTVTVSSASTKGPSVFPLAPSSKSTSGGTAALGCLVKDYFPEPVTVSWNSGALTSGVHTFPAVLQSSGLYSLSSVVTVPSSSLGTQTYICNVNHKPSNTKVDKKVEPKSC

SEQ ID NO: 1532 - protein, 220 aa, synthetic construct
EVQLVESGGGLVQPGGSLRLSCAASGFTFSHFGMHWVRQAPGKGLEWVSYISSGSSTIYYADTLKGRFTISRDNSKNTLYLQMNSLRAEDTAVYYCARRGEGAMDYWGQGTTVTVSSASTKGPSVFPLAPSSKSTSGGTAALGCLVKDYFPEPVTVSWNSGALTSGVHTFPAVLQSSGLYSLSSVVTVPSSSLGTQTYICNVNHKPSNTKVDKKVEPKSC

SEQ ID NO: 1533 - protein, 220 aa, synthetic construct
EVQLVESGGGLVQPGGSLRLSCAASGFTFSKFGMHWVRQAPGKGLEWVSYISSGSSTIYYADTLKGRFTISRDNSKNTLYLQMNSLRAEDTAVYYCARRGEGAMDYWGQGTTVTVSSASTKGPSVFPLAPSSKSTSGGTAALGCLVKDYFPEPVTVSWNSGALTSGVHTFPAVLQSSGLYSLSSVVTVPSSSLGTQTYICNVNHKPSNTKVDKKVEPKSC

SEQ ID NO: 1534 - protein, 220 aa, synthetic construct
EVQLVESGGGLVQPGGSLRLSCAASGFTFSLFGMHWVRQAPGKGLEWVSYISSGSSTIYYADTLKGRFTISRDNSKNTLYLQMNSLRAEDTAVYYCARRGEGAMDYWGQGTTVTVSSASTKGPSVFPLAPSSKSTSGGTAALGCLVKDYFPEPVTVSWNSGALTSGVHTFPAVLQSSGLYSLSSVVTVPSSSLGTQTYICNVNHKPSNTKVDKKVEPKSC

SEQ ID NO: 1535 - protein, 220 aa, synthetic construct
EVQLVESGGGLVQPGGSLRLSCAASGFTFSMFGMHWVRQAPGKGLEWVSYISSGSSTIYYADTLKGRFTISRDNSKNTLYLQMNSLRAEDTAVYYCARRGEGAMDYWGQGTTVTVSSASTKGPSVFPLAPSSKSTSGGTAALGCLVKDYFPEPVTVSWNSGALTSGVHTFPAVLQSSGLYSLSSVVTVPSSSLGTQTYICNVNHKPSNTKVDKKVEPKSC

SEQ ID NO: 1536 - protein, 220 aa, synthetic construct
EVQLVESGGGLVQPGGSLRLSCAASGFTFSPFGMHWVRQAPGKGLEWVSYISSGSSTIYYADTLKGRFTISRDNSKNTLYLQMNSLRAEDTAVYYCARRGEGAMDYWGQGTTVTVSSASTKGPSVFPLAPSSKSTSGGTAALGCLVKDYFPEPVTVSWNSGALTSGVHTFPAVLQSSGLYSLSSVVTVPSSSLGTQTYICNVNHKPSNTKVDKKVEPKSC

SEQ ID NO: 1537 - protein, 220 aa, synthetic construct
EVQLVESGGGLVQPGGSLRLSCAASGFTFSQFGMHWVRQAPGKGLEWVSYISSGSSTIYYADTLKGRFTISRDNSKNTLYLQMNSLRAEDTAVYYCARRGEGAMDYWGQGTTVTVSSASTKGPSVFPLAPSSKSTSGGTAALGCLVKDYFPEPVTVSWNSGALTSGVHTFPAVLQSSGLYSLSSVVTVPSSSLGTQTYICNVNHKPSNTKVDKKVEPKSC

SEQ ID NO: 1538 - protein, 220 aa, synthetic construct
EVQLVESGGGLVQPGGSLRLSCAASGFTFSSFGMHWVRQAPGKGLEWVSYISSGSSTIYYADTLKGRFTISRDNSKNTLYLQMNSLRAEDTAVYYCARRGEGAMDYWGQGTTVTVSSASTKGPSVFPLAPSSKSTSGGTAALGCLVKDYFPEPVTVSWNSGALTSGVHTFPAVLQSSGLYSLSSVVTVPSSSLGTQTYICNVNHKPSNTKVDKKVEPKSC

SEQ ID NO: 1539 - protein, 220 aa, synthetic construct
EVQLVESGGGLVQPGGSLRLSCAASGFTFSTFGMHWVRQAPGKGLEWVSYISSGSSTIYYADTLKGRFTISRDNSKNTLYLQMNSLRAEDTAVYYCARRGEGAMDYWGQGTTVTVSSASTKGPSVFPLAPSSKSTSGGTAALGCLVKDYFPEPVTVSWNSGALTSGVHTFPAVLQSSGLYSLSSVVTVPSSSLGTQTYICNVNHKPSNTKVDKKVEPKSC

SEQ ID NO: 1540 - protein, 220 aa, synthetic construct
EVQLVESGGGLVQPGGSLRLSCAASGFTFSVFGMHWVRQAPGKGLEWVSYISSGSSTIYYADTLKGRFTISRDNSKNTLYLQMNSLRAEDTAVYYCARRGEGAMDYWGQGTTVTVSSASTKGPSVFPLAPSSKSTSGGTAALGCLVKDYFPEPVTVSWNSGALTSGVHTFPAVLQSSGLYSLSSVVTVPSSSLGTQTYICNVNHKPSNTKVDKKVEPKSC

SEQ ID NO: 1541 - protein, 220 aa, synthetic construct
EVQLVESGGGLVQPGGSLRLSCAASGFTFSWFGMHWVRQAPGKGLEWVSYISSGSSTIYYADTLKGRFTISRDNSKNTLYLQMNSLRAEDTAVYYCARRGEGAMDYWGQGTTVTVSSASTKGPSVFPLAPSSKSTSGGTAALGCLVKDYFPEPVTVSWNSGALTSGVHTFPAVLQSSGLYSLSSVVTVPSSSLGTQTYICNVNHKPSNTKVDKKVEPKSC

SEQ ID NO: 1542 - protein, 220 aa, synthetic construct
EVQLVESGGGLVQPGGSLRLSCAASGFTFSNAGMHWVRQAPGKGLEWVSYISSGSSTIYYADTLKGRFTISRDNSKNTLYLQMNSLRAEDTAVYYCARRGEGAMDYWGQGTTVTVSSASTKGPSVFPLAPSSKSTSGGTAALGCLVKDYFPEPVTVSWNSGALTSGVHTFPAVLQSSGLYSLSSVVTVPSSSLGTQTYICNVNHKPSNTKVDKKVEPKSC

SEQ ID NO: 1543 - protein, 220 aa, synthetic construct
EVQLVESGGGLVQPGGSLRLSCAASGFTFSNDGMHWVRQAPGKGLEWVSYISSGSSTIYYADTLKGRFTISRDNSKNTLYLQMNSLRAEDTAVYYCARRGEGAMDYWGQGTTVTVSSASTKGPSVFPLAPSSKSTSGGTAALGCLVKDYFPEPVTVSWNSGALTSGVHTFPAVLQSSGLYSLSSVVTVPSSSLGTQTYICNVNHKPSNTKVDKKVEPKSC

SEQ ID NO: 1544 - protein, 220 aa, synthetic construct
EVQLVESGGGLVQPGGSLRLSCAASGFTFSNEGMHWVRQAPGKGLEWVSYISSGSSTIYYADTLKGRFTISRDNSKNTLYLQMNSLRAEDTAVYYCARRGEGAMDYWGQGTTVTVSSASTKGPSVFPLAPSSKSTSGGTAALGCLVKDYFPEPVTVSWNSGALTSGVHTFPAVLQSSGLYSLSSVVTVPSSSLGTQTYICNVNHKPSNTKVDKKVEPKSC

SEQ ID NO: 1545 - protein, 220 aa, synthetic construct
EVQLVESGGGLVQPGGSLRLSCAASGFTFSNGGMHWVRQAPGKGLEWVSYISSGSSTIYYADTLKGRFTISRDNSKNTLYLQMNSLRAEDTAVYYCARRGEGAMDYWGQGTTVTVSSASTKGPSVFPLAPSSKSTSGGTAALGCLVKDYFPEPVTVSWNSGALTSGVHTFPAVLQSSGLYSLSSVVTVPSSSLGTQTYICNVNHKPSNTKVDKKVEPKSC

SEQ ID NO: 1546 - protein, 220 aa, synthetic construct
EVQLVESGGGLVQPGGSLRLSCAASGFTFSNHGMHWVRQAPGKGLEWVSYISSGSSTIYYADTLKGRFTISRDNSKNTLYLQMNSLRAEDTAVYYCARRGEGAMDYWGQGTTVTVSSASTKGPSVFPLAPSSKSTSGGTAALGCLVKDYFPEPVTVSWNSGALTSGVHTFPAVLQSSGLYSLSSVVTVPSSSLGTQTYICNVNHKPSNTKVDKKVEPKSC

SEQ ID NO: 1547 - protein, 220 aa, synthetic construct
EVQLVESGGGLVQPGGSLRLSCAASGFTFSNIGMHWVRQAPGKGLEWVSYISSGSSTIYYADTLKGRFTISRDNSKNTLYLQMNSLRAEDTAVYYCARRGEGAMDYWGQGTTVTVSSASTKGPSVFPLAPSSKSTSGGTAALGCLVKDYFPEPVTVSWNSGALTSGVHTFPAVLQSSGLYSLSSVVTVPSSSLGTQTYICNVNHKPSNTKVDKKVEPKSC

SEQ ID NO: 1548 - protein, 220 aa, synthetic construct
EVQLVESGGGLVQPGGSLRLSCAASGFTFSNLGMHWVRQAPGKGLEWVSYISSGSSTIYYADTLKGRFTISRDNSKNTLYLQMNSLRAEDTAVYYCARRGEGAMDYWGQGTTVTVSSASTKGPSVFPLAPSSKSTSGGTAALGCLVKDYFPEPVTVSWNSGALTSGVHTFPAVLQSSGLYSLSSVVTVPSSSLGTQTYICNVNHKPSNTKVDKKVEPKSC

SEQ ID NO: 1549 - protein, 220 aa, synthetic construct
EVQLVESGGGLVQPGGSLRLSCAASGFTFSNMGMHWVRQAPGKGLEWVSYISSGSSTIYYADTLKGRFTISRDNSKNTLYLQMNSLRAEDTAVYYCARRGEGAMDYWGQGTTVTVSSASTKGPSVFPLAPSSKSTSGGTAALGCLVKDYFPEPVTVSWNSGALTSGVHTFPAVLQSSGLYSLSSVVTVPSSSLGTQTYICNVNHKPSNTKVDKKVEPKSC

SEQ ID NO: 1550 - protein, 220 aa, synthetic construct
EVQLVESGGGLVQPGGSLRLSCAASGFTFSNNGMHWVRQAPGKGLEWVSYISSGSSTIYYADTLKGRFTISRDNSKNTLYLQMNSLRAEDTAVYYCARRGEGAMDYWGQGTTVTVSSASTKGPSVFPLAPSSKSTSGGTAALGCLVKDYFPEPVTVSWNSGALTSGVHTFPAVLQSSGLYSLSSVVTVPSSSLGTQTYICNVNHKPSNTKVDKKVEPKSC

SEQ ID NO: 1551 - protein, 220 aa, synthetic construct
EVQLVESGGGLVQPGGSLRLSCAASGFTFSNPGMHWVRQAPGKGLEWVSYISSGSSTIYYADTLKGRFTISRDNSKNTLYLQMNSLRAEDTAVYYCARRGEGAMDYWGQGTTVTVSSASTKGPSVFPLAPSSKSTSGGTAALGCLVKDYFPEPVTVSWNSGALTSGVHTFPAVLQSSGLYSLSSVVTVPSSSLGTQTYICNVNHKPSNTKVDKKVEPKSC

SEQ ID NO: 1552 - protein, 220 aa, synthetic construct
EVQLVESGGGLVQPGGSLRLSCAASGFTFSNQGMHWVRQAPGKGLEWVSYISSGSSTIYYADTLKGRFTISRDNSKNTLYLQMNSLRAEDTAVYYCARRGEGAMDYWGQGTTVTVSSASTKGPSVFPLAPSSKSTSGGTAALGCLVKDYFPEPVTVSWNSGALTSGVHTFPAVLQSSGLYSLSSVVTVPSSSLGTQTYICNVNHKPSNTKVDKKVEPKSC

SEQ ID NO: 1553 - protein, 220 aa, synthetic construct
EVQLVESGGGLVQPGGSLRLSCAASGFTFSNRGMHWVRQAPGKGLEWVSYISSGSSTIYYADTLKGRFTISRDNSKNTLYLQMNSLRAEDTAVYYCARRGEGAMDYWGQGTTVTVSSASTKGPSVFPLAPSSKSTSGGTAALGCLVKDYFPEPVTVSWNSGALTSGVHTFPAVLQSSGLYSLSSVVTVPSSSLGTQTYICNVNHKPSNTKVDKKVEPKSC

SEQ ID NO: 1554 - protein, 220 aa, synthetic construct
EVQLVESGGGLVQPGGSLRLSCAASGFTFSNVGMHWVRQAPGKGLEWVSYISSGSSTIYYADTLKGRFTISRDNSKNTLYLQMNSLRAEDTAVYYCARRGEGAMDYWGQGTTVTVSSASTKGPSVFPLAPSSKSTSGGTAALGCLVKDYFPEPVTVSWNSGALTSGVHTFPAVLQSSGLYSLSSVVTVPSSSLGTQTYICNVNHKPSNTKVDKKVEPKSC

SEQ ID NO: 1555 - protein, 220 aa, synthetic construct
EVQLVESGGGLVQPGGSLRLSCAASGFTFSNWGMHWVRQAPGKGLEWVSYISSGSSTIYYADTLKGRFTISRDNSKNTLYLQMNSLRAEDTAVYYCARRGEGAMDYWGQGTTVTVSSASTKGPSVFPLAPSSKSTSGGTAALGCLVKDYFPEPVTVSWNSGALTSGVHTFPAVLQSSGLYSLSSVVTVPSSSLGTQTYICNVNHKPSNTKVDKKVEPKSC

SEQ ID NO: 1556 - protein, 220 aa, synthetic construct
EVQLVESGGGLVQPGGSLRLSCAASGFTFSNYGMAWVRQAPGKGLEWVSYISSGSSTIYYADTLKGRFTISRDNSKNTLYLQMNSLRAEDTAVYYCARRGEGAMDYWGQGTTVTVSSASTKGPSVFPLAPSSKSTSGGTAALGCLVKDYFPEPVTVSWNSGALTSGVHTFPAVLQSSGLYSLSSVVTVPSSSLGTQTYICNVNHKPSNTKVDKKVEPKSC

SEQ ID NO: 1557 - protein, 220 aa, synthetic construct
EVQLVESGGGLVQPGGSLRLSCAASGFTFSNFGMDWVRQAPGKGLEWVSYISSGSSTIYYADTLKGRFTISRDNSKNTLYLQMNSLRAEDTAVYYCARRGEGAMDYWGQGTTVTVSSASTKGPSVFPLAPSSKSTSGGTAALGCLVKDYFPEPVTVSWNSGALTSGVHTFPAVLQSSGLYSLSSVVTVPSSSLGTQTYICNVNHKPSNTKVDKKVEPKSC

SEQ ID NO: 1558 - protein, 220 aa, synthetic construct
EVQLVESGGGLVQPGGSLRLSCAASGFTFSNFGMEWVRQAPGKGLEWVSYISSGSSTIYYADTLKGRFTISRDNSKNTLYLQMNSLRAEDTAVYYCARRGEGAMDYWGQGTTVTVSSASTKGPSVFPLAPSSKSTSGGTAALGCLVKDYFPEPVTVSWNSGALTSGVHTFPAVLQSSGLYSLSSVVTVPSSSLGTQTYICNVNHKPSNTKVDKKVEPKSC

SEQ ID NO: 1559 - protein, 220 aa, synthetic construct
EVQLVESGGGLVQPGGSLRLSCAASGFTFSNFGMFWVRQAPGKGLEWVSYISSGSSTIYYADTLKGRFTISRDNSKNTLYLQMNSLRAEDTAVYYCARRGEGAMDYWGQGTTVTVSSASTKGPSVFPLAPSSKSTSGGTAALGCLVKDYFPEPVTVSWNSGALTSGVHTFPAVLQSSGLYSLSSVVTVPSSSLGTQTYICNVNHKPSNTKVDKKVEPKSC

SEQ ID NO: 1560 - protein, 220 aa, synthetic construct
EVQLVESGGGLVQPGGSLRLSCAASGFTFSNFGMGWVRQAPGKGLEWVSYISSGSSTIYYADTLKGRFTISRDNSKNTLYLQMNSLRAEDTAVYYCARRGEGAMDYWGQGTTVTVSSASTKGPSVFPLAPSSKSTSGGTAALGCLVKDYFPEPVTVSWNSGALTSGVHTFPAVLQSSGLYSLSSVVTVPSSSLGTQTYICNVNHKPSNTKVDKKVEPKSC

SEQ ID NO: 1561 - protein, 220 aa, synthetic construct
EVQLVESGGGLVQPGGSLRLSCAASGFTFSNFGMIWVRQAPGKGLEWVSYISSGSSTIYYADTLKGRFTISRDNSKNTLYLQMNSLRAEDTAVYYCARRGEGAMDYWGQGTTVTVSSASTKGPSVFPLAPSSKSTSGGTAALGCLVKDYFPEPVTVSWNSGALTSGVHTFPAVLQSSGLYSLSSVVTVPSSSLGTQTYICNVNHKPSNTKVDKKVEPKSC

SEQ ID NO: 1562 - protein, 220 aa, synthetic construct
EVQLVESGGGLVQPGGSLRLSCAASGFTFSNFGMKWVRQAPGKGLEWVSYISSGSSTIYYADTLKGRFTISRDNSKNTLYLQMNSLRAEDTAVYYCARRGEGAMDYWGQGTTVTVSSASTKGPSVFPLAPSSKSTSGGTAALGCLVKDYFPEPVTVSWNSGALTSGVHTFPAVLQSSGLYSLSSVVTVPSSSLGTQTYICNVNHKPSNTKVDKKVEPKSC

SEQ ID NO: 1563 - protein, 220 aa, synthetic construct
EVQLVESGGGLVQPGGSLRLSCAASGFTFSNFGMLWVRQAPGKGLEWVSYISSGSSTIYYADTLKGRFTISRDNSKNTLYLQMNSLRAEDTAVYYCARRGEGAMDYWGQGTTVTVSSASTKGPSVFPLAPSSKSTSGGTAALGCLVKDYFPEPVTVSWNSGALTSGVHTFPAVLQSSGLYSLSSVVTVPSSSLGTQTYICNVNHKPSNTKVDKKVEPKSC

SEQ ID NO: 1564 - protein, 220 aa, synthetic construct
EVQLVESGGGLVQPGGSLRLSCAASGFTFSNFGMMWVRQAPGKGLEWVSYISSGSSTIYYADTLKGRFTISRDNSKNTLYLQMNSLRAEDTAVYYCARRGEGAMDYWGQGTTVTVSSASTKGPSVFPLAPSSKSTSGGTAALGCLVKDYFPEPVTVSWNSGALTSGVHTFPAVLQSSGLYSLSSVVTVPSSSLGTQTYICNVNHKPSNTKVDKKVEPKSC

SEQ ID NO: 1565 - protein, 220 aa, synthetic construct
EVQLVESGGGLVQPGGSLRLSCAASGFTFSNFGMNWVRQAPGKGLEWVSYISSGSSTIYYADTLKGRFTISRDNSKNTLYLQMNSLRAEDTAVYYCARRGEGAMDYWGQGTTVTVSSASTKGPSVFPLAPSSKSTSGGTAALGCLVKDYFPEPVTVSWNSGALTSGVHTFPAVLQSSGLYSLSSVVTVPSSSLGTQTYICNVNHKPSNTKVDKKVEPKSC

SEQ ID NO: 1566 - protein, 220 aa, synthetic construct
EVQLVESGGGLVQPGGSLRLSCAASGFTFSNFGMPWVRQAPGKGLEWVSYISSGSSTIYYADTLKGRFTISRDNSKNTLYLQMNSLRAEDTAVYYCARRGEGAMDYWGQGTTVTVSSASTKGPSVFPLAPSSKSTSGGTAALGCLVKDYFPEPVTVSWNSGALTSGVHTFPAVLQSSGLYSLSSVVTVPSSSLGTQTYICNVNHKPSNTKVDKKVEPKSC

SEQ ID NO: 1567 - protein, 220 aa, synthetic construct
EVQLVESGGGLVQPGGSLRLSCAASGFTFSNFGMQWVRQAPGKGLEWVSYISSGSSTIYYADTLKGRFTISRDNSKNTLYLQMNSLRAEDTAVYYCARRGEGAMDYWGQGTTVTVSSASTKGPSVFPLAPSSKSTSGGTAALGCLVKDYFPEPVTVSWNSGALTSGVHTFPAVLQSSGLYSLSSVVTVPSSSLGTQTYICNVNHKPSNTKVDKKVEPKSC

SEQ ID NO: 1568 - protein, 220 aa, synthetic construct
EVQLVESGGGLVQPGGSLRLSCAASGFTFSNFGMSWVRQAPGKGLEWVSYISSGSSTIYYADTLKGRFTISRDNSKNTLYLQMNSLRAEDTAVYYCARRGEGAMDYWGQGTTVTVSSASTKGPSVFPLAPSSKSTSGGTAALGCLVKDYFPEPVTVSWNSGALTSGVHTFPAVLQSSGLYSLSSVVTVPSSSLGTQTYICNVNHKPSNTKVDKKVEPKSC

SEQ ID NO: 1569 - protein, 220 aa, synthetic construct
EVQLVESGGGLVQPGGSLRLSCAASGFTFSNFGMTWVRQAPGKGLEWVSYISSGSSTIYYADTLKGRFTISRDNSKNTLYLQMNSLRAEDTAVYYCARRGEGAMDYWGQGTTVTVSSASTKGPSVFPLAPSSKSTSGGTAALGCLVKDYFPEPVTVSWNSGALTSGVHTFPAVLQSSGLYSLSSVVTVPSSSLGTQTYICNVNHKPSNTKVDKKVEPKSC

SEQ ID NO: 1570 - protein, 220 aa, synthetic construct
EVQLVESGGGLVQPGGSLRLSCAASGFTFSNFGMWWVRQAPGKGLEWVSYISSGSSTIYYADTLKGRFTISRDNSKNTLYLQMNSLRAEDTAVYYCARRGEGAMDYWGQGTTVTVSSASTKGPSVFPLAPSSKSTSGGTAALGCLVKDYFPEPVTVSWNSGALTSGVHTFPAVLQSSGLYSLSSVVTVPSSSLGTQTYICNVNHKPSNTKVDKKVEPKSC

SEQ ID NO: 1571 - protein, 220 aa, synthetic construct
EVQLVESGGGLVQPGGSLRLSCAASGFTFSNFGMYWVRQAPGKGLEWVSYISSGSSTIYYADTLKGRFTISRDNSKNTLYLQMNSLRAEDTAVYYCARRGEGAMDYWGQGTTVTVSSASTKGPSVFPLAPSSKSTSGGTAALGCLVKDYFPEPVTVSWNSGALTSGVHTFPAVLQSSGLYSLSSVVTVPSSSLGTQTYICNVNHKPSNTKVDKKVEPKSC

SEQ ID NO: 1572 - protein, 220 aa, synthetic construct
EVQLVESGGGLVQPGGSLRLSCAASGFTFSNFGMHWVRQAPGKGLEWVSYISAGSSTIYYADTLKGRFTISRDNSKNTLYLQMNSLRAEDTAVYYCARRGEGAMDYWGQGTTVTVSSASTKGPSVFPLAPSSKSTSGGTAALGCLVKDYFPEPVTVSWNSGALTSGVHTFPAVLQSSGLYSLSSVVTVPSSSLGTQTYICNVNHKPSNTKVDKKVEPKSC

SEQ ID NO: 1573 - protein, 220 aa, synthetic construct
EVQLVESGGGLVQPGGSLRLSCAASGFTFSNFGMHWVRQAPGKGLEWVSYISDGSSTIYYADTLKGRFTISRDNSKNTLYLQMNSLRAEDTAVYYCARRGEGAMDYWGQGTTVTVSSASTKGPSVFPLAPSSKSTSGGTAALGCLVKDYFPEPVTVSWNSGALTSGVHTFPAVLQSSGLYSLSSVVTVPSSSLGTQTYICNVNHKPSNTKVDKKVEPKSC

SEQ ID NO: 1574 - protein, 220 aa, synthetic construct
EVQLVESGGGLVQPGGSLRLSCAASGFTFSNFGMHWVRQAPGKGLEWVSYISEGSSTIYYADTLKGRFTISRDNSKNTLYLQMNSLRAEDTAVYYCARRGEGAMDYWGQGTTVTVSSASTKGPSVFPLAPSSKSTSGGTAALGCLVKDYFPEPVTVSWNSGALTSGVHTFPAVLQSSGLYSLSSVVTVPSSSLGTQTYICNVNHKPSNTKVDKKVEPKSC

SEQ ID NO: 1575 - protein, 220 aa, synthetic construct
EVQLVESGGGLVQPGGSLRLSCAASGFTFSNFGMHWVRQAPGKGLEWVSYISFGSSTIYYADTLKGRFTISRDNSKNTLYLQMNSLRAEDTAVYYCARRGEGAMDYWGQGTTVTVSSASTKGPSVFPLAPSSKSTSGGTAALGCLVKDYFPEPVTVSWNSGALTSGVHTFPAVLQSSGLYSLSSVVTVPSSSLGTQTYICNVNHKPSNTKVDKKVEPKSC

SEQ ID NO: 1576 - protein, 220 aa, synthetic construct
EVQLVESGGGLVQPGGSLRLSCAASGFTFSNFGMHWVRQAPGKGLEWVSYISGGSSTIYYADTLKGRFTISRDNSKNTLYLQMNSLRAEDTAVYYCARRGEGAMDYWGQGTTVTVSSASTKGPSVFPLAPSSKSTSGGTAALGCLVKDYFPEPVTVSWNSGALTSGVHTFPAVLQSSGLYSLSSVVTVPSSSLGTQTYICNVNHKPSNTKVDKKVEPKSC

SEQ ID NO: 1577 - protein, 220 aa, synthetic construct
EVQLVESGGGLVQPGGSLRLSCAASGFTFSNFGMHWVRQAPGKGLEWVSYISHGSSTIYYADTLKGRFTISRDNSKNTLYLQMNSLRAEDTAVYYCARRGEGAMDYWGQGTTVTVSSASTKGPSVFPLAPSSKSTSGGTAALGCLVKDYFPEPVTVSWNSGALTSGVHTFPAVLQSSGLYSLSSVVTVPSSSLGTQTYICNVNHKPSNTKVDKKVEPKSC

SEQ ID NO: 1578 - protein, 220 aa, synthetic construct
EVQLVESGGGLVQPGGSLRLSCAASGFTFSNFGMHWVRQAPGKGLEWVSYISIGSSTIYYADTLKGRFTISRDNSKNTLYLQMNSLRAEDTAVYYCARRGEGAMDYWGQGTTVTVSSASTKGPSVFPLAPSSKSTSGGTAALGCLVKDYFPEPVTVSWNSGALTSGVHTFPAVLQSSGLYSLSSVVTVPSSSLGTQTYICNVNHKPSNTKVDKKVEPKSC

SEQ ID NO: 1579 - protein, 220 aa, synthetic construct
EVQLVESGGGLVQPGGSLRLSCAASGFTFSNFGMHWVRQAPGKGLEWVSYISKGSSTIYYADTLKGRFTISRDNSKNTLYLQMNSLRAEDTAVYYCARRGEGAMDYWGQGTTVTVSSASTKGPSVFPLAPSSKSTSGGTAALGCLVKDYFPEPVTVSWNSGALTSGVHTFPAVLQSSGLYSLSSVVTVPSSSLGTQTYICNVNHKPSNTKVDKKVEPKSC

SEQ ID NO: 1580 - protein, 220 aa, synthetic construct
EVQLVESGGGLVQPGGSLRLSCAASGFTFSNFGMHWVRQAPGKGLEWVSYISLGSSTIYYADTLKGRFTISRDNSKNTLYLQMNSLRAEDTAVYYCARRGEGAMDYWGQGTTVTVSSASTKGPSVFPLAPSSKSTSGGTAALGCLVKDYFPEPVTVSWNSGALTSGVHTFPAVLQSSGLYSLSSVVTVPSSSLGTQTYICNVNHKPSNTKVDKKVEPKSC

SEQ ID NO: 1581 - protein, 220 aa, synthetic construct
EVQLVESGGGLVQPGGSLRLSCAASGFTFSNFGMHWVRQAPGKGLEWVSYISMGSSTIYYADTLKGRFTISRDNSKNTLYLQMNSLRAEDTAVYYCARRGEGAMDYWGQGTTVTVSSASTKGPSVFPLAPSSKSTSGGTAALGCLVKDYFPEPVTVSWNSGALTSGVHTFPAVLQSSGLYSLSSVVTVPSSSLGTQTYICNVNHKPSNTKVDKKVEPKSC

SEQ ID NO: 1582 - protein, 220 aa, synthetic construct
EVQLVESGGGLVQPGGSLRLSCAASGFTFSNFGMHWVRQAPGKGLEWVSYISNGSSTIYYADTLKGRFTISRDNSKNTLYLQMNSLRAEDTAVYYCARRGEGAMDYWGQGTTVTVSSASTKGPSVFPLAPSSKSTSGGTAALGCLVKDYFPEPVTVSWNSGALTSGVHTFPAVLQSSGLYSLSSVVTVPSSSLGTQTYICNVNHKPSNTKVDKKVEPKSC

SEQ ID NO: 1583 - protein, 220 aa, synthetic construct
EVQLVESGGGLVQPGGSLRLSCAASGFTFSNFGMHWVRQAPGKGLEWVSYISPGSSTIYYADTLKGRFTISRDNSKNTLYLQMNSLRAEDTAVYYCARRGEGAMDYWGQGTTVTVSSASTKGPSVFPLAPSSKSTSGGTAALGCLVKDYFPEPVTVSWNSGALTSGVHTFPAVLQSSGLYSLSSVVTVPSSSLGTQTYICNVNHKPSNTKVDKKVEPKSC

SEQ ID NO: 1584 - protein, 220 aa, synthetic construct
EVQLVESGGGLVQPGGSLRLSCAASGFTFSNFGMHWVRQAPGKGLEWVSYISQGSSTIYYADTLKGRFTISRDNSKNTLYLQMNSLRAEDTAVYYCARRGEGAMDYWGQGTTVTVSSASTKGPSVFPLAPSSKSTSGGTAALGCLVKDYFPEPVTVSWNSGALTSGVHTFPAVLQSSGLYSLSSVVTVPSSSLGTQTYICNVNHKPSNTKVDKKVEPKSC

SEQ ID NO: 1585 - protein, 220 aa, synthetic construct
EVQLVESGGGLVQPGGSLRLSCAASGFTFSNFGMHWVRQAPGKGLEWVSYISTGSSTIYYADTLKGRFTISRDNSKNTLYLQMNSLRAEDTAVYYCARRGEGAMDYWGQGTTVTVSSASTKGPSVFPLAPSSKSTSGGTAALGCLVKDYFPEPVTVSWNSGALTSGVHTFPAVLQSSGLYSLSSVVTVPSSSLGTQTYICNVNHKPSNTKVDKKVEPKSC

SEQ ID NO: 1586 - protein, 220 aa, synthetic construct
EVQLVESGGGLVQPGGSLRLSCAASGFTFSNFGMHWVRQAPGKGLEWVSYISVGSSTIYYADTLKGRFTISRDNSKNTLYLQMNSLRAEDTAVYYCARRGEGAMDYWGQGTTVTVSSASTKGPSVFPLAPSSKSTSGGTAALGCLVKDYFPEPVTVSWNSGALTSGVHTFPAVLQSSGLYSLSSVVTVPSSSLGTQTYICNVNHKPSNTKVDKKVEPKSC

SEQ ID NO: 1587 - protein, 220 aa, synthetic construct
EVQLVESGGGLVQPGGSLRLSCAASGFTFSNFGMHWVRQAPGKGLEWVSYISWGSSTIYYADTLKGRFTISRDNSKNTLYLQMNSLRAEDTAVYYCARRGEGAMDYWGQGTTVTVSSASTKGPSVFPLAPSSKSTSGGTAALGCLVKDYFPEPVTVSWNSGALTSGVHTFPAVLQSSGLYSLSSVVTVPSSSLGTQTYICNVNHKPSNTKVDKKVEPKSC

SEQ ID NO: 1588 - protein, 220 aa, synthetic construct
EVQLVESGGGLVQPGGSLRLSCAASGFTFSNFGMHWVRQAPGKGLEWVSYISYGSSTIYYADTLKGRFTISRDNSKNTLYLQMNSLRAEDTAVYYCARRGEGAMDYWGQGTTVTVSSASTKGPSVFPLAPSSKSTSGGTAALGCLVKDYFPEPVTVSWNSGALTSGVHTFPAVLQSSGLYSLSSVVTVPSSSLGTQTYICNVNHKPSNTKVDKKVEPKSC

SEQ ID NO: 1589 - protein, 220 aa, synthetic construct
EVQLVESGGGLVQPGGSLRLSCAASGFTFSNFGMHWVRQAPGKGLEWVSYISSASSTIYYADTLKGRFTISRDNSKNTLYLQMNSLRAEDTAVYYCARRGEGAMDYWGQGTTVTVSSASTKGPSVFPLAPSSKSTSGGTAALGCLVKDYFPEPVTVSWNSGALTSGVHTFPAVLQSSGLYSLSSVVTVPSSSLGTQTYICNVNHKPSNTKVDKKVEPKSC

SEQ ID NO: 1590 - protein, 220 aa, synthetic construct
EVQLVESGGGLVQPGGSLRLSCAASGFTFSNFGMHWVRQAPGKGLEWVSYISSDSSTIYYADTLKGRFTISRDNSKNTLYLQMNSLRAEDTAVYYCARRGEGAMDYWGQGTTVTVSSASTKGPSVFPLAPSSKSTSGGTAALGCLVKDYFPEPVTVSWNSGALTSGVHTFPAVLQSSGLYSLSSVVTVPSSSLGTQTYICNVNHKPSNTKVDKKVEPKSC

SEQ ID NO: 1591 - protein, 220 aa, synthetic construct
EVQLVESGGGLVQPGGSLRLSCAASGFTFSNFGMHWVRQAPGKGLEWVSYISSESSTIYYADTLKGRFTISRDNSKNTLYLQMNSLRAEDTAVYYCARRGEGAMDYWGQGTTVTVSSASTKGPSVFPLAPSSKSTSGGTAALGCLVKDYFPEPVTVSWNSGALTSGVHTFPAVLQSSGLYSLSSVVTVPSSSLGTQTYICNVNHKPSNTKVDKKVEPKSC

SEQ ID NO: 1592 - protein, 220 aa, synthetic construct
EVQLVESGGGLVQPGGSLRLSCAASGFTFSNFGMHWVRQAPGKGLEWVSYISSFSSTIYYADTLKGRFTISRDNSKNTLYLQMNSLRAEDTAVYYCARRGEGAMDYWGQGTTVTVSSASTKGPSVFPLAPSSKSTSGGTAALGCLVKDYFPEPVTVSWNSGALTSGVHTFPAVLQSSGLYSLSSVVTVPSSSLGTQTYICNVNHKPSNTKVDKKVEPKSC

SEQ ID NO: 1593 - protein, 220 aa, synthetic construct
EVQLVESGGGLVQPGGSLRLSCAASGFTFSNFGMHWVRQAPGKGLEWVSYISSHSSTIYYADTLKGRFTISRDNSKNTLYLQMNSLRAEDTAVYYCARRGEGAMDYWGQGTTVTVSSASTKGPSVFPLAPSSKSTSGGTAALGCLVKDYFPEPVTVSWNSGALTSGVHTFPAVLQSSGLYSLSSVVTVPSSSLGTQTYICNVNHKPSNTKVDKKVEPKSC

SEQ ID NO: 1594 - protein, 220 aa, synthetic construct
EVQLVESGGGLVQPGGSLRLSCAASGFTFSNFGMHWVRQAPGKGLEWVSYISSISSTIYYADTLKGRFTISRDNSKNTLYLQMNSLRAEDTAVYYCARRGEGAMDYWGQGTTVTVSSASTKGPSVFPLAPSSKSTSGGTAALGCLVKDYFPEPVTVSWNSGALTSGVHTFPAVLQSSGLYSLSSVVTVPSSSLGTQTYICNVNHKPSNTKVDKKVEPKSC

SEQ ID NO: 1595 - protein, 220 aa, synthetic construct
EVQLVESGGGLVQPGGSLRLSCAASGFTFSNFGMHWVRQAPGKGLEWVSYISSKSSTIYYADTLKGRFTISRDNSKNTLYLQMNSLRAEDTAVYYCARRGEGAMDYWGQGTTVTVSSASTKGPSVFPLAPSSKSTSGGTAALGCLVKDYFPEPVTVSWNSGALTSGVHTFPAVLQSSGLYSLSSVVTVPSSSLGTQTYICNVNHKPSNTKVDKKVEPKSC

SEQ ID NO: 1596 - protein, 220 aa, synthetic construct
EVQLVESGGGLVQPGGSLRLSCAASGFTFSNFGMHWVRQAPGKGLEWVSYISSLSSTIYYADTLKGRFTISRDNSKNTLYLQMNSLRAEDTAVYYCARRGEGAMDYWGQGTTVTVSSASTKGPSVFPLAPSSKSTSGGTAALGCLVKDYFPEPVTVSWNSGALTSGVHTFPAVLQSSGLYSLSSVVTVPSSSLGTQTYICNVNHKPSNTKVDKKVEPKSC

SEQ ID NO: 1597 - protein, 220 aa, synthetic construct
EVQLVESGGGLVQPGGSLRLSCAASGFTFSNFGMHWVRQAPGKGLEWVSYISSMSSTIYYADTLKGRFTISRDNSKNTLYLQMNSLRAEDTAVYYCARRGEGAMDYWGQGTTVTVSSASTKGPSVFPLAPSSKSTSGGTAALGCLVKDYFPEPVTVSWNSGALTSGVHTFPAVLQSSGLYSLSSVVTVPSSSLGTQTYICNVNHKPSNTKVDKKVEPKSC

SEQ ID NO: 1598 - protein, 220 aa, synthetic construct
EVQLVESGGGLVQPGGSLRLSCAASGFTFSNFGMHWVRQAPGKGLEWVSYISSNSSTIYYADTLKGRFTISRDNSKNTLYLQMNSLRAEDTAVYYCARRGEGAMDYWGQGTTVTVSSASTKGPSVFPLAPSSKSTSGGTAALGCLVKDYFPEPVTVSWNSGALTSGVHTFPAVLQSSGLYSLSSVVTVPSSSLGTQTYICNVNHKPSNTKVDKKVEPKSC

SEQ ID NO: 1599 - protein, 220 aa, synthetic construct
EVQLVESGGGLVQPGGSLRLSCAASGFTFSNFGMHWVRQAPGKGLEWVSYISSPSSTIYYADTLKGRFTISRDNSKNTLYLQMNSLRAEDTAVYYCARRGEGAMDYWGQGTTVTVSSASTKGPSVFPLAPSSKSTSGGTAALGCLVKDYFPEPVTVSWNSGALTSGVHTFPAVLQSSGLYSLSSVVTVPSSSLGTQTYICNVNHKPSNTKVDKKVEPKSC

SEQ ID NO: 1600 - protein, 220 aa, synthetic construct
EVQLVESGGGLVQPGGSLRLSCAASGFTFSNFGMHWVRQAPGKGLEWVSYISSQSSTIYYADTLKGRFTISRDNSKNTLYLQMNSLRAEDTAVYYCARRGEGAMDYWGQGTTVTVSSASTKGPSVFPLAPSSKSTSGGTAALGCLVKDYFPEPVTVSWNSGALTSGVHTFPAVLQSSGLYSLSSVVTVPSSSLGTQTYICNVNHKPSNTKVDKKVEPKSC

SEQ ID NO: 1601 - protein, 220 aa, synthetic construct
EVQLVESGGGLVQPGGSLRLSCAASGFTFSNFGMHWVRQAPGKGLEWVSYISSRSSTIYYADTLKGRFTISRDNSKNTLYLQMNSLRAEDTAVYYCARRGEGAMDYWGQGTTVTVSSASTKGPSVFPLAPSSKSTSGGTAALGCLVKDYFPEPVTVSWNSGALTSGVHTFPAVLQSSGLYSLSSVVTVPSSSLGTQTYICNVNHKPSNTKVDKKVEPKSC

SEQ ID NO: 1602 - protein, 220 aa, synthetic construct
EVQLVESGGGLVQPGGSLRLSCAASGFTFSNFGMHWVRQAPGKGLEWVSYISSVSSTIYYADTLKGRFTISRDNSKNTLYLQMNSLRAEDTAVYYCARRGEGAMDYWGQGTTVTVSSASTKGPSVFPLAPSSKSTSGGTAALGCLVKDYFPEPVTVSWNSGALTSGVHTFPAVLQSSGLYSLSSVVTVPSSSLGTQTYICNVNHKPSNTKVDKKVEPKSC

SEQ ID NO: 1603 - protein, 220 aa, synthetic construct
EVQLVESGGGLVQPGGSLRLSCAASGFTFSNFGMHWVRQAPGKGLEWVSYISSGASTIYYADTLKGRFTISRDNSKNTLYLQMNSLRAEDTAVYYCARRGEGAMDYWGQGTTVTVSSASTKGPSVFPLAPSSKSTSGGTAALGCLVKDYFPEPVTVSWNSGALTSGVHTFPAVLQSSGLYSLSSVVTVPSSSLGTQTYICNVNHKPSNTKVDKKVEPKSC

SEQ ID NO: 1604 - protein, 220 aa, synthetic construct
EVQLVESGGGLVQPGGSLRLSCAASGFTFSNFGMHWVRQAPGKGLEWVSYISSGDSTIYYADTLKGRFTISRDNSKNTLYLQMNSLRAEDTAVYYCARRGEGAMDYWGQGTTVTVSSASTKGPSVFPLAPSSKSTSGGTAALGCLVKDYFPEPVTVSWNSGALTSGVHTFPAVLQSSGLYSLSSVVTVPSSSLGTQTYICNVNHKPSNTKVDKKVEPKSC

SEQ ID NO: 1605 - protein, 220 aa, synthetic construct
EVQLVESGGGLVQPGGSLRLSCAASGFTFSNFGMHWVRQAPGKGLEWVSYISSGESTIYYADTLKGRFTISRDNSKNTLYLQMNSLRAEDTAVYYCARRGEGAMDYWGQGTTVTVSSASTKGPSVFPLAPSSKSTSGGTAALGCLVKDYFPEPVTVSWNSGALTSGVHTFPAVLQSSGLYSLSSVVTVPSSSLGTQTYICNVNHKPSNTKVDKKVEPKSC

SEQ ID NO: 1606 - protein, 220 aa, synthetic construct
EVQLVESGGGLVQPGGSLRLSCAASGFTFSNFGMHWVRQAPGKGLEWVSYISSGFSTIYYADTLKGRFTISRDNSKNTLYLQMNSLRAEDTAVYYCARRGEGAMDYWGQGTTVTVSSASTKGPSVFPLAPSSKSTSGGTAALGCLVKDYFPEPVTVSWNSGALTSGVHTFPAVLQSSGLYSLSSVVTVPSSSLGTQTYICNVNHKPSNTKVDKKVEPKSC

SEQ ID NO: 1607 - protein, 220 aa, synthetic construct
EVQLVESGGGLVQPGGSLRLSCAASGFTFSNFGMHWVRQAPGKGLEWVSYISSGGSTIYYADTLKGRFTISRDNSKNTLYLQMNSLRAEDTAVYYCARRGEGAMDYWGQGTTVTVSSASTKGPSVFPLAPSSKSTSGGTAALGCLVKDYFPEPVTVSWNSGALTSGVHTFPAVLQSSGLYSLSSVVTVPSSSLGTQTYICNVNHKPSNTKVDKKVEPKSC

SEQ ID NO: 1608 - protein, 220 aa, synthetic construct
EVQLVESGGGLVQPGGSLRLSCAASGFTFSNFGMHWVRQAPGKGLEWVSYISSGISTIYYADTLKGRFTISRDNSKNTLYLQMNSLRAEDTAVYYCARRGEGAMDYWGQGTTVTVSSASTKGPSVFPLAPSSKSTSGGTAALGCLVKDYFPEPVTVSWNSGALTSGVHTFPAVLQSSGLYSLSSVVTVPSSSLGTQTYICNVNHKPSNTKVDKKVEPKSC

SEQ ID NO: 1609 - protein, 220 aa, synthetic construct
EVQLVESGGGLVQPGGSLRLSCAASGFTFSNFGMHWVRQAPGKGLEWVSYISSGKSTIYYADTLKGRFTISRDNSKNTLYLQMNSLRAEDTAVYYCARRGEGAMDYWGQGTTVTVSSASTKGPSVFPLAPSSKSTSGGTAALGCLVKDYFPEPVTVSWNSGALTSGVHTFPAVLQSSGLYSLSSVVTVPSSSLGTQTYICNVNHKPSNTKVDKKVEPKSC

SEQ ID NO: 1610 - protein, 220 aa, synthetic construct
EVQLVESGGGLVQPGGSLRLSCAASGFTFSNFGMHWVRQAPGKGLEWVSYISSGLSTIYYADTLKGRFTISRDNSKNTLYLQMNSLRAEDTAVYYCARRGEGAMDYWGQGTTVTVSSASTKGPSVFPLAPSSKSTSGGTAALGCLVKDYFPEPVTVSWNSGALTSGVHTFPAVLQSSGLYSLSSVVTVPSSSLGTQTYICNVNHKPSNTKVDKKVEPKSC

SEQ ID NO: 1611 - protein, 220 aa, synthetic construct
EVQLVESGGGLVQPGGSLRLSCAASGFTFSNFGMHWVRQAPGKGLEWVSYISSGMSTIYYADTLKGRFTISRDNSKNTLYLQMNSLRAEDTAVYYCARRGEGAMDYWGQGTTVTVSSASTKGPSVFPLAPSSKSTSGGTAALGCLVKDYFPEPVTVSWNSGALTSGVHTFPAVLQSSGLYSLSSVVTVPSSSLGTQTYICNVNHKPSNTKVDKKVEPKSC

SEQ ID NO: 1612 - protein, 220 aa, synthetic construct
EVQLVESGGGLVQPGGSLRLSCAASGFTFSNFGMHWVRQAPGKGLEWVSYISSGNSTIYYADTLKGRFTISRDNSKNTLYLQMNSLRAEDTAVYYCARRGEGAMDYWGQGTTVTVSSASTKGPSVFPLAPSSKSTSGGTAALGCLVKDYFPEPVTVSWNSGALTSGVHTFPAVLQSSGLYSLSSVVTVPSSSLGTQTYICNVNHKPSNTKVDKKVEPKSC

SEQ ID NO: 1613 - protein, 220 aa, synthetic construct
EVQLVESGGGLVQPGGSLRLSCAASGFTFSNFGMHWVRQAPGKGLEWVSYISSGPSTIYYADTLKGRFTISRDNSKNTLYLQMNSLRAEDTAVYYCARRGEGAMDYWGQGTTVTVSSASTKGPSVFPLAPSSKSTSGGTAALGCLVKDYFPEPVTVSWNSGALTSGVHTFPAVLQSSGLYSLSSVVTVPSSSLGTQTYICNVNHKPSNTKVDKKVEPKSC

SEQ ID NO: 1614 - protein, 220 aa, synthetic construct
EVQLVESGGGLVQPGGSLRLSCAASGFTFSNFGMHWVRQAPGKGLEWVSYISSGQSTIYYADTLKGRFTISRDNSKNTLYLQMNSLRAEDTAVYYCARRGEGAMDYWGQGTTVTVSSASTKGPSVFPLAPSSKSTSGGTAALGCLVKDYFPEPVTVSWNSGALTSGVHTFPAVLQSSGLYSLSSVVTVPSSSLGTQTYICNVNHKPSNTKVDKKVEPKSC

SEQ ID NO: 1615 - protein, 220 aa, synthetic construct
EVQLVESGGGLVQPGGSLRLSCAASGFTFSNFGMHWVRQAPGKGLEWVSYISSGRSTIYYADTLKGRFTISRDNSKNTLYLQMNSLRAEDTAVYYCARRGEGAMDYWGQGTTVTVSSASTKGPSVFPLAPSSKSTSGGTAALGCLVKDYFPEPVTVSWNSGALTSGVHTFPAVLQSSGLYSLSSVVTVPSSSLGTQTYICNVNHKPSNTKVDKKVEPKSC

SEQ ID NO: 1616 - protein, 220 aa, synthetic construct
EVQLVESGGGLVQPGGSLRLSCAASGFTFSNFGMHWVRQAPGKGLEWVSYISSGTSTIYYADTLKGRFTISRDNSKNTLYLQMNSLRAEDTAVYYCARRGEGAMDYWGQGTTVTVSSASTKGPSVFPLAPSSKSTSGGTAALGCLVKDYFPEPVTVSWNSGALTSGVHTFPAVLQSSGLYSLSSVVTVPSSSLGTQTYICNVNHKPSNTKVDKKVEPKSC

SEQ ID NO: 1617 - protein, 220 aa, synthetic construct
EVQLVESGGGLVQPGGSLRLSCAASGFTFSNFGMHWVRQAPGKGLEWVSYISSGWSTIYYADTLKGRFTISRDNSKNTLYLQMNSLRAEDTAVYYCARRGEGAMDYWGQGTTVTVSSASTKGPSVFPLAPSSKSTSGGTAALGCLVKDYFPEPVTVSWNSGALTSGVHTFPAVLQSSGLYSLSSVVTVPSSSLGTQTYICNVNHKPSNTKVDKKVEPKSC

SEQ ID NO: 1618 - protein, 220 aa, synthetic construct
EVQLVESGGGLVQPGGSLRLSCAASGFTFSNFGMHWVRQAPGKGLEWVSYISSGYSTIYYADTLKGRFTISRDNSKNTLYLQMNSLRAEDTAVYYCARRGEGAMDYWGQGTTVTVSSASTKGPSVFPLAPSSKSTSGGTAALGCLVKDYFPEPVTVSWNSGALTSGVHTFPAVLQSSGLYSLSSVVTVPSSSLGTQTYICNVNHKPSNTKVDKKVEPKSC

SEQ ID NO: 1619 - protein, 220 aa, synthetic construct
EVQLVESGGGLVQPGGSLRLSCAASGFTFSNFGMHWVRQAPGKGLEWVSYISSGSDTIYYADTLKGRFTISRDNSKNTLYLQMNSLRAEDTAVYYCARRGEGAMDYWGQGTTVTVSSASTKGPSVFPLAPSSKSTSGGTAALGCLVKDYFPEPVTVSWNSGALTSGVHTFPAVLQSSGLYSLSSVVTVPSSSLGTQTYICNVNHKPSNTKVDKKVEPKSC

SEQ ID NO: 1620 - protein, 220 aa, synthetic construct
EVQLVESGGGLVQPGGSLRLSCAASGFTFSNFGMHWVRQAPGKGLEWVSYISSGSETIYYADTLKGRFTISRDNSKNTLYLQMNSLRAEDTAVYYCARRGEGAMDYWGQGTTVTVSSASTKGPSVFPLAPSSKSTSGGTAALGCLVKDYFPEPVTVSWNSGALTSGVHTFPAVLQSSGLYSLSSVVTVPSSSLGTQTYICNVNHKPSNTKVDKKVEPKSC

SEQ ID NO: 1621 - protein, 220 aa, synthetic construct
EVQLVESGGGLVQPGGSLRLSCAASGFTFSNFGMHWVRQAPGKGLEWVSYISSGSFTIYYADTLKGRFTISRDNSKNTLYLQMNSLRAEDTAVYYCARRGEGAMDYWGQGTTVTVSSASTKGPSVFPLAPSSKSTSGGTAALGCLVKDYFPEPVTVSWNSGALTSGVHTFPAVLQSSGLYSLSSVVTVPSSSLGTQTYICNVNHKPSNTKVDKKVEPKSC

SEQ ID NO: 1622 - protein, 220 aa, synthetic construct
EVQLVESGGGLVQPGGSLRLSCAASGFTFSNFGMHWVRQAPGKGLEWVSYISSGSGTIYYADTLKGRFTISRDNSKNTLYLQMNSLRAEDTAVYYCARRGEGAMDYWGQGTTVTVSSASTKGPSVFPLAPSSKSTSGGTAALGCLVKDYFPEPVTVSWNSGALTSGVHTFPAVLQSSGLYSLSSVVTVPSSSLGTQTYICNVNHKPSNTKVDKKVEPKSC

SEQ ID NO: 1623 - protein, 220 aa, synthetic construct
EVQLVESGGGLVQPGGSLRLSCAASGFTFSNFGMHWVRQAPGKGLEWVSYISSGSHTIYYADTLKGRFTISRDNSKNTLYLQMNSLRAEDTAVYYCARRGEGAMDYWGQGTTVTVSSASTKGPSVFPLAPSSKSTSGGTAALGCLVKDYFPEPVTVSWNSGALTSGVHTFPAVLQSSGLYSLSSVVTVPSSSLGTQTYICNVNHKPSNTKVDKKVEPKSC

SEQ ID NO: 1624 - protein, 220 aa, synthetic construct
EVQLVESGGGLVQPGGSLRLSCAASGFTFSNFGMHWVRQAPGKGLEWVSYISSGSITIYYADTLKGRFTISRDNSKNTLYLQMNSLRAEDTAVYYCARRGEGAMDYWGQGTTVTVSSASTKGPSVFPLAPSSKSTSGGTAALGCLVKDYFPEPVTVSWNSGALTSGVHTFPAVLQSSGLYSLSSVVTVPSSSLGTQTYICNVNHKPSNTKVDKKVEPKSC

SEQ ID NO: 1625 - protein, 220 aa, synthetic construct
EVQLVESGGGLVQPGGSLRLSCAASGFTFSNFGMHWVRQAPGKGLEWVSYISSGSKTIYYADTLKGRFTISRDNSKNTLYLQMNSLRAEDTAVYYCARRGEGAMDYWGQGTTVTVSSASTKGPSVFPLAPSSKSTSGGTAALGCLVKDYFPEPVTVSWNSGALTSGVHTFPAVLQSSGLYSLSSVVTVPSSSLGTQTYICNVNHKPSNTKVDKKVEPKSC

SEQ ID NO: 1626 - protein, 220 aa, synthetic construct
EVQLVESGGGLVQPGGSLRLSCAASGFTFSNFGMHWVRQAPGKGLEWVSYISSGSLTIYYADTLKGRFTISRDNSKNTLYLQMNSLRAEDTAVYYCARRGEGAMDYWGQGTTVTVSSASTKGPSVFPLAPSSKSTSGGTAALGCLVKDYFPEPVTVSWNSGALTSGVHTFPAVLQSSGLYSLSSVVTVPSSSLGTQTYICNVNHKPSNTKVDKKVEPKSC

SEQ ID NO: 1627 - protein, 220 aa, synthetic construct
EVQLVESGGGLVQPGGSLRLSCAASGFTFSNFGMHWVRQAPGKGLEWVSYISSGSMTIYYADTLKGRFTISRDNSKNTLYLQMNSLRAEDTAVYYCARRGEGAMDYWGQGTTVTVSSASTKGPSVFPLAPSSKSTSGGTAALGCLVKDYFPEPVTVSWNSGALTSGVHTFPAVLQSSGLYSLSSVVTVPSSSLGTQTYICNVNHKPSNTKVDKKVEPKSC

SEQ ID NO: 1628 - protein, 220 aa, synthetic construct
EVQLVESGGGLVQPGGSLRLSCAASGFTFSNFGMHWVRQAPGKGLEWVSYISSGSNTIYYADTLKGRFTISRDNSKNTLYLQMNSLRAEDTAVYYCARRGEGAMDYWGQGTTVTVSSASTKGPSVFPLAPSSKSTSGGTAALGCLVKDYFPEPVTVSWNSGALTSGVHTFPAVLQSSGLYSLSSVVTVPSSSLGTQTYICNVNHKPSNTKVDKKVEPKSC

SEQ ID NO: 1629 - protein, 220 aa, synthetic construct
EVQLVESGGGLVQPGGSLRLSCAASGFTFSNFGMHWVRQAPGKGLEWVSYISSGSPTIYYADTLKGRFTISRDNSKNTLYLQMNSLRAEDTAVYYCARRGEGAMDYWGQGTTVTVSSASTKGPSVFPLAPSSKSTSGGTAALGCLVKDYFPEPVTVSWNSGALTSGVHTFPAVLQSSGLYSLSSVVTVPSSSLGTQTYICNVNHKPSNTKVDKKVEPKSC

SEQ ID NO: 1630 - protein, 220 aa, synthetic construct
EVQLVESGGGLVQPGGSLRLSCAASGFTFSNFGMHWVRQAPGKGLEWVSYISSGSQTIYYADTLKGRFTISRDNSKNTLYLQMNSLRAEDTAVYYCARRGEGAMDYWGQGTTVTVSSASTKGPSVFPLAPSSKSTSGGTAALGCLVKDYFPEPVTVSWNSGALTSGVHTFPAVLQSSGLYSLSSVVTVPSSSLGTQTYICNVNHKPSNTKVDKKVEPKSC

SEQ ID NO: 1631 - protein, 220 aa, synthetic construct
EVQLVESGGGLVQPGGSLRLSCAASGFTFSNFGMHWVRQAPGKGLEWVSYISSGSRTIYYADTLKGRFTISRDNSKNTLYLQMNSLRAEDTAVYYCARRGEGAMDYWGQGTTVTVSSASTKGPSVFPLAPSSKSTSGGTAALGCLVKDYFPEPVTVSWNSGALTSGVHTFPAVLQSSGLYSLSSVVTVPSSSLGTQTYICNVNHKPSNTKVDKKVEPKSC

SEQ ID NO: 1632 - protein, 220 aa, synthetic construct
EVQLVESGGGLVQPGGSLRLSCAASGFTFSNFGMHWVRQAPGKGLEWVSYISSGSTTIYYADTLKGRFTISRDNSKNTLYLQMNSLRAEDTAVYYCARRGEGAMDYWGQGTTVTVSSASTKGPSVFPLAPSSKSTSGGTAALGCLVKDYFPEPVTVSWNSGALTSGVHTFPAVLQSSGLYSLSSVVTVPSSSLGTQTYICNVNHKPSNTKVDKKVEPKSC

SEQ ID NO: 1633 - protein, 220 aa, synthetic construct
EVQLVESGGGLVQPGGSLRLSCAASGFTFSNFGMHWVRQAPGKGLEWVSYISSGSVTIYYADTLKGRFTISRDNSKNTLYLQMNSLRAEDTAVYYCARRGEGAMDYWGQGTTVTVSSASTKGPSVFPLAPSSKSTSGGTAALGCLVKDYFPEPVTVSWNSGALTSGVHTFPAVLQSSGLYSLSSVVTVPSSSLGTQTYICNVNHKPSNTKVDKKVEPKSC

SEQ ID NO: 1634 - protein, 220 aa, synthetic construct
EVQLVESGGGLVQPGGSLRLSCAASGFTFSNFGMHWVRQAPGKGLEWVSYISSGSWTIYYADTLKGRFTISRDNSKNTLYLQMNSLRAEDTAVYYCARRGEGAMDYWGQGTTVTVSSASTKGPSVFPLAPSSKSTSGGTAALGCLVKDYFPEPVTVSWNSGALTSGVHTFPAVLQSSGLYSLSSVVTVPSSSLGTQTYICNVNHKPSNTKVDKKVEPKSC

SEQ ID NO: 1635 - protein, 220 aa, synthetic construct
EVQLVESGGGLVQPGGSLRLSCAASGFTFSNFGMHWVRQAPGKGLEWVSYISSGSYTIYYADTLKGRFTISRDNSKNTLYLQMNSLRAEDTAVYYCARRGEGAMDYWGQGTTVTVSSASTKGPSVFPLAPSSKSTSGGTAALGCLVKDYFPEPVTVSWNSGALTSGVHTFPAVLQSSGLYSLSSVVTVPSSSLGTQTYICNVNHKPSNTKVDKKVEPKSC

SEQ ID NO: 1636 - protein, 220 aa, synthetic construct
EVQLVESGGGLVQPGGSLRLSCAASGFTFSNFGMHWVRQAPGKGLEWVSYISSGSSAIYYADTLKGRFTISRDNSKNTLYLQMNSLRAEDTAVYYCARRGEGAMDYWGQGTTVTVSSASTKGPSVFPLAPSSKSTSGGTAALGCLVKDYFPEPVTVSWNSGALTSGVHTFPAVLQSSGLYSLSSVVTVPSSSLGTQTYICNVNHKPSNTKVDKKVEPKSC

SEQ ID NO: 1637 - protein, 220 aa, synthetic construct
EVQLVESGGGLVQPGGSLRLSCAASGFTFSNFGMHWVRQAPGKGLEWVSYISSGSSDIYYADTLKGRFTISRDNSKNTLYLQMNSLRAEDTAVYYCARRGEGAMDYWGQGTTVTVSSASTKGPSVFPLAPSSKSTSGGTAALGCLVKDYFPEPVTVSWNSGALTSGVHTFPAVLQSSGLYSLSSVVTVPSSSLGTQTYICNVNHKPSNTKVDKKVEPKSC

SEQ ID NO: 1638 - protein, 220 aa, synthetic construct
EVQLVESGGGLVQPGGSLRLSCAASGFTFSNFGMHWVRQAPGKGLEWVSYISSGSSEIYYADTLKGRFTISRDNSKNTLYLQMNSLRAEDTAVYYCARRGEGAMDYWGQGTTVTVSSASTKGPSVFPLAPSSKSTSGGTAALGCLVKDYFPEPVTVSWNSGALTSGVHTFPAVLQSSGLYSLSSVVTVPSSSLGTQTYICNVNHKPSNTKVDKKVEPKSC

SEQ ID NO: 1639 - protein, 220 aa, synthetic construct
EVQLVESGGGLVQPGGSLRLSCAASGFTFSNFGMHWVRQAPGKGLEWVSYISSGSSFIYYADTLKGRFTISRDNSKNTLYLQMNSLRAEDTAVYYCARRGEGAMDYWGQGTTVTVSSASTKGPSVFPLAPSSKSTSGGTAALGCLVKDYFPEPVTVSWNSGALTSGVHTFPAVLQSSGLYSLSSVVTVPSSSLGTQTYICNVNHKPSNTKVDKKVEPKSC

SEQ ID NO: 1640 - protein, 220 aa, synthetic construct
EVQLVESGGGLVQPGGSLRLSCAASGFTFSNFGMHWVRQAPGKGLEWVSYISSGSSHIYYADTLKGRFTISRDNSKNTLYLQMNSLRAEDTAVYYCARRGEGAMDYWGQGTTVTVSSASTKGPSVFPLAPSSKSTSGGTAALGCLVKDYFPEPVTVSWNSGALTSGVHTFPAVLQSSGLYSLSSVVTVPSSSLGTQTYICNVNHKPSNTKVDKKVEPKSC

SEQ ID NO: 1641 - protein, 220 aa, synthetic construct
EVQLVESGGGLVQPGGSLRLSCAASGFTFSNFGMHWVRQAPGKGLEWVSYISSGSSIIYYADTLKGRFTISRDNSKNTLYLQMNSLRAEDTAVYYCARRGEGAMDYWGQGTTVTVSSASTKGPSVFPLAPSSKSTSGGTAALGCLVKDYFPEPVTVSWNSGALTSGVHTFPAVLQSSGLYSLSSVVTVPSSSLGTQTYICNVNHKPSNTKVDKKVEPKSC

SEQ ID NO: 1642 - protein, 220 aa, synthetic construct
EVQLVESGGGLVQPGGSLRLSCAASGFTFSNFGMHWVRQAPGKGLEWVSYISSGSSKIYYADTLKGRFTISRDNSKNTLYLQMNSLRAEDTAVYYCARRGEGAMDYWGQGTTVTVSSASTKGPSVFPLAPSSKSTSGGTAALGCLVKDYFPEPVTVSWNSGALTSGVHTFPAVLQSSGLYSLSSVVTVPSSSLGTQTYICNVNHKPSNTKVDKKVEPKSC

SEQ ID NO: 1643 - protein, 220 aa, synthetic construct
EVQLVESGGGLVQPGGSLRLSCAASGFTFSNFGMHWVRQAPGKGLEWVSYISSGSSLIYYADTLKGRFTISRDNSKNTLYLQMNSLRAEDTAVYYCARRGEGAMDYWGQGTTVTVSSASTKGPSVFPLAPSSKSTSGGTAALGCLVKDYFPEPVTVSWNSGALTSGVHTFPAVLQSSGLYSLSSVVTVPSSSLGTQTYICNVNHKPSNTKVDKKVEPKSC

SEQ ID NO: 1644 - protein, 220 aa, synthetic construct
EVQLVESGGGLVQPGGSLRLSCAASGFTFSNFGMHWVRQAPGKGLEWVSYISSGSSMIYYADTLKGRFTISRDNSKNTLYLQMNSLRAEDTAVYYCARRGEGAMDYWGQGTTVTVSSASTKGPSVFPLAPSSKSTSGGTAALGCLVKDYFPEPVTVSWNSGALTSGVHTFPAVLQSSGLYSLSSVVTVPSSSLGTQTYICNVNHKPSNTKVDKKVEPKSC

SEQ ID NO: 1645 - protein, 220 aa, synthetic construct
EVQLVESGGGLVQPGGSLRLSCAASGFTFSNFGMHWVRQAPGKGLEWVSYISSGSSPIYYADTLKGRFTISRDNSKNTLYLQMNSLRAEDTAVYYCARRGEGAMDYWGQGTTVTVSSASTKGPSVFPLAPSSKSTSGGTAALGCLVKDYFPEPVTVSWNSGALTSGVHTFPAVLQSSGLYSLSSVVTVPSSSLGTQTYICNVNHKPSNTKVDKKVEPKSC

SEQ ID NO: 1646 - protein, 220 aa, synthetic construct
EVQLVESGGGLVQPGGSLRLSCAASGFTFSNFGMHWVRQAPGKGLEWVSYISSGSSQIYYADTLKGRFTISRDNSKNTLYLQMNSLRAEDTAVYYCARRGEGAMDYWGQGTTVTVSSASTKGPSVFPLAPSSKSTSGGTAALGCLVKDYFPEPVTVSWNSGALTSGVHTFPAVLQSSGLYSLSSVVTVPSSSLGTQTYICNVNHKPSNTKVDKKVEPKSC

SEQ ID NO: 1647 - protein, 220 aa, synthetic construct
EVQLVESGGGLVQPGGSLRLSCAASGFTFSNFGMHWVRQAPGKGLEWVSYISSGSSRIYYADTLKGRFTISRDNSKNTLYLQMNSLRAEDTAVYYCARRGEGAMDYWGQGTTVTVSSASTKGPSVFPLAPSSKSTSGGTAALGCLVKDYFPEPVTVSWNSGALTSGVHTFPAVLQSSGLYSLSSVVTVPSSSLGTQTYICNVNHKPSNTKVDKKVEPKSC

SEQ ID NO: 1648 - protein, 220 aa, synthetic construct
EVQLVESGGGLVQPGGSLRLSCAASGFTFSNFGMHWVRQAPGKGLEWVSYISSGSSSIYYADTLKGRFTISRDNSKNTLYLQMNSLRAEDTAVYYCARRGEGAMDYWGQGTTVTVSSASTKGPSVFPLAPSSKSTSGGTAALGCLVKDYFPEPVTVSWNSGALTSGVHTFPAVLQSSGLYSLSSVVTVPSSSLGTQTYICNVNHKPSNTKVDKKVEPKSC

SEQ ID NO: 1649 - protein, 220 aa, synthetic construct
EVQLVESGGGLVQPGGSLRLSCAASGFTFSNFGMHWVRQAPGKGLEWVSYISSGSSWIYYADTLKGRFTISRDNSKNTLYLQMNSLRAEDTAVYYCARRGEGAMDYWGQGTTVTVSSASTKGPSVFPLAPSSKSTSGGTAALGCLVKDYFPEPVTVSWNSGALTSGVHTFPAVLQSSGLYSLSSVVTVPSSSLGTQTYICNVNHKPSNTKVDKKVEPKSC

SEQ ID NO: 1650 - protein, 220 aa, synthetic construct
EVQLVESGGGLVQPGGSLRLSCAASGFTFSNFGMHWVRQAPGKGLEWVSYISSGSSYIYYADTLKGRFTISRDNSKNTLYLQMNSLRAEDTAVYYCARRGEGAMDYWGQGTTVTVSSASTKGPSVFPLAPSSKSTSGGTAALGCLVKDYFPEPVTVSWNSGALTSGVHTFPAVLQSSGLYSLSSVVTVPSSSLGTQTYICNVNHKPSNTKVDKKVEPKSC

SEQ ID NO: 1651 - protein, 220 aa, synthetic construct
EVQLVESGGGLVQPGGSLRLSCAASGFTFSNFGMHWVRQAPGKGLEWVSYISSGSSTAYYADTLKGRFTISRDNSKNTLYLQMNSLRAEDTAVYYCARRGEGAMDYWGQGTTVTVSSASTKGPSVFPLAPSSKSTSGGTAALGCLVKDYFPEPVTVSWNSGALTSGVHTFPAVLQSSGLYSLSSVVTVPSSSLGTQTYICNVNHKPSNTKVDKKVEPKSC

SEQ ID NO: 1652 - protein, 220 aa, synthetic construct
EVQLVESGGGLVQPGGSLRLSCAASGFTFSNFGMHWVRQAPGKGLEWVSYISSGSSTDYYADTLKGRFTISRDNSKNTLYLQMNSLRAEDTAVYYCARRGEGAMDYWGQGTTVTVSSASTKGPSVFPLAPSSKSTSGGTAALGCLVKDYFPEPVTVSWNSGALTSGVHTFPAVLQSSGLYSLSSVVTVPSSSLGTQTYICNVNHKPSNTKVDKKVEPKSC

SEQ ID NO: 1653 - protein, 220 aa, synthetic construct
EVQLVESGGGLVQPGGSLRLSCAASGFTFSNFGMHWVRQAPGKGLEWVSYISSGSSTEYYADTLKGRFTISRDNSKNTLYLQMNSLRAEDTAVYYCARRGEGAMDYWGQGTTVTVSSASTKGPSVFPLAPSSKSTSGGTAALGCLVKDYFPEPVTVSWNSGALTSGVHTFPAVLQSSGLYSLSSVVTVPSSSLGTQTYICNVNHKPSNTKVDKKVEPKSC

SEQ ID NO: 1654 - protein, 220 aa, synthetic construct
EVQLVESGGGLVQPGGSLRLSCAASGFTFSNFGMHWVRQAPGKGLEWVSYISSGSSTGYYADTLKGRFTISRDNSKNTLYLQMNSLRAEDTAVYYCARRGEGAMDYWGQGTTVTVSSASTKGPSVFPLAPSSKSTSGGTAALGCLVKDYFPEPVTVSWNSGALTSGVHTFPAVLQSSGLYSLSSVVTVPSSSLGTQTYICNVNHKPSNTKVDKKVEPKSC

SEQ ID NO: 1655 - protein, 220 aa, synthetic construct
EVQLVESGGGLVQPGGSLRLSCAASGFTFSNFGMHWVRQAPGKGLEWVSYISSGSSTHYYADTLKGRFTISRDNSKNTLYLQMNSLRAEDTAVYYCARRGEGAMDYWGQGTTVTVSSASTKGPSVFPLAPSSKSTSGGTAALGCLVKDYFPEPVTVSWNSGALTSGVHTFPAVLQSSGLYSLSSVVTVPSSSLGTQTYICNVNHKPSNTKVDKKVEPKSC

SEQ ID NO: 1656 - protein, 220 aa, synthetic construct
EVQLVESGGGLVQPGGSLRLSCAASGFTFSNFGMHWVRQAPGKGLEWVSYISSGSSTKYYADTLKGRFTISRDNSKNTLYLQMNSLRAEDTAVYYCARRGEGAMDYWGQGTTVTVSSASTKGPSVFPLAPSSKSTSGGTAALGCLVKDYFPEPVTVSWNSGALTSGVHTFPAVLQSSGLYSLSSVVTVPSSSLGTQTYICNVNHKPSNTKVDKKVEPKSC

SEQ ID NO: 1657 - protein, 220 aa, synthetic construct
EVQLVESGGGLVQPGGSLRLSCAASGFTFSNFGMHWVRQAPGKGLEWVSYISSGSSTLYYADTLKGRFTISRDNSKNTLYLQMNSLRAEDTAVYYCARRGEGAMDYWGQGTTVTVSSASTKGPSVFPLAPSSKSTSGGTAALGCLVKDYFPEPVTVSWNSGALTSGVHTFPAVLQSSGLYSLSSVVTVPSSSLGTQTYICNVNHKPSNTKVDKKVEPKSC

SEQ ID NO: 1658 - protein, 220 aa, synthetic construct
EVQLVESGGGLVQPGGSLRLSCAASGFTFSNFGMHWVRQAPGKGLEWVSYISSGSSTMYYADTLKGRFTISRDNSKNTLYLQMNSLRAEDTAVYYCARRGEGAMDYWGQGTTVTVSSASTKGPSVFPLAPSSKSTSGGTAALGCLVKDYFPEPVTVSWNSGALTSGVHTFPAVLQSSGLYSLSSVVTVPSSSLGTQTYICNVNHKPSNTKVDKKVEPKSC

SEQ ID NO: 1659 - protein, 220 aa, synthetic construct
EVQLVESGGGLVQPGGSLRLSCAASGFTFSNFGMHWVRQAPGKGLEWVSYISSGSSTNYYADTLKGRFTISRDNSKNTLYLQMNSLRAEDTAVYYCARRGEGAMDYWGQGTTVTVSSASTKGPSVFPLAPSSKSTSGGTAALGCLVKDYFPEPVTVSWNSGALTSGVHTFPAVLQSSGLYSLSSVVTVPSSSLGTQTYICNVNHKPSNTKVDKKVEPKSC

SEQ ID NO: 1660 - protein, 220 aa, synthetic construct
EVQLVESGGGLVQPGGSLRLSCAASGFTFSNFGMHWVRQAPGKGLEWVSYISSGSSTPYYADTLKGRFTISRDNSKNTLYLQMNSLRAEDTAVYYCARRGEGAMDYWGQGTTVTVSSASTKGPSVFPLAPSSKSTSGGTAALGCLVKDYFPEPVTVSWNSGALTSGVHTFPAVLQSSGLYSLSSVVTVPSSSLGTQTYICNVNHKPSNTKVDKKVEPKSC

SEQ ID NO: 1661 - protein, 220 aa, synthetic construct
EVQLVESGGGLVQPGGSLRLSCAASGFTFSNFGMHWVRQAPGKGLEWVSYISSGSSTRYYADTLKGRFTISRDNSKNTLYLQMNSLRAEDTAVYYCARRGEGAMDYWGQGTTVTVSSASTKGPSVFPLAPSSKSTSGGTAALGCLVKDYFPEPVTVSWNSGALTSGVHTFPAVLQSSGLYSLSSVVTVPSSSLGTQTYICNVNHKPSNTKVDKKVEPKSC

SEQ ID NO: 1662 - protein, 220 aa, synthetic construct
EVQLVESGGGLVQPGGSLRLSCAASGFTFSNFGMHWVRQAPGKGLEWVSYISSGSSTSYYADTLKGRFTISRDNSKNTLYLQMNSLRAEDTAVYYCARRGEGAMDYWGQGTTVTVSSASTKGPSVFPLAPSSKSTSGGTAALGCLVKDYFPEPVTVSWNSGALTSGVHTFPAVLQSSGLYSLSSVVTVPSSSLGTQTYICNVNHKPSNTKVDKKVEPKSC

SEQ ID NO: 1663 - protein, 220 aa, synthetic construct
EVQLVESGGGLVQPGGSLRLSCAASGFTFSNFGMHWVRQAPGKGLEWVSYISSGSSTTYYADTLKGRFTISRDNSKNTLYLQMNSLRAEDTAVYYCARRGEGAMDYWGQGTTVTVSSASTKGPSVFPLAPSSKSTSGGTAALGCLVKDYFPEPVTVSWNSGALTSGVHTFPAVLQSSGLYSLSSVVTVPSSSLGTQTYICNVNHKPSNTKVDKKVEPKSC

SEQ ID NO: 1664 - protein, 220 aa, synthetic construct
EVQLVESGGGLVQPGGSLRLSCAASGFTFSNFGMHWVRQAPGKGLEWVSYISSGSSTVYYADTLKGRFTISRDNSKNTLYLQMNSLRAEDTAVYYCARRGEGAMDYWGQGTTVTVSSASTKGPSVFPLAPSSKSTSGGTAALGCLVKDYFPEPVTVSWNSGALTSGVHTFPAVLQSSGLYSLSSVVTVPSSSLGTQTYICNVNHKPSNTKVDKKVEPKSC

SEQ ID NO: 1665 - protein, 220 aa, synthetic construct
EVQLVESGGGLVQPGGSLRLSCAASGFTFSNFGMHWVRQAPGKGLEWVSYISSGSSTWYYADTLKGRFTISRDNSKNTLYLQMNSLRAEDTAVYYCARRGEGAMDYWGQGTTVTVSSASTKGPSVFPLAPSSKSTSGGTAALGCLVKDYFPEPVTVSWNSGALTSGVHTFPAVLQSSGLYSLSSVVTVPSSSLGTQTYICNVNHKPSNTKVDKKVEPKSC

SEQ ID NO: 1666 - protein, 220 aa, synthetic construct
EVQLVESGGGLVQPGGSLRLSCAASGFTFSNFGMHWVRQAPGKGLEWVSYISSGSSTYYYADTLKGRFTISRDNSKNTLYLQMNSLRAEDTAVYYCARRGEGAMDYWGQGTTVTVSSASTKGPSVFPLAPSSKSTSGGTAALGCLVKDYFPEPVTVSWNSGALTSGVHTFPAVLQSSGLYSLSSVVTVPSSSLGTQTYICNVNHKPSNTKVDKKVEPKSC

SEQ ID NO: 1667 - protein, 220 aa, synthetic construct
EVQLVESGGGLVQPGGSLRLSCAASGFTFSNFGMHWVRQAPGKGLEWVSYISSGSSTIAYADTLKGRFTISRDNSKNTLYLQMNSLRAEDTAVYYCARRGEGAMDYWGQGTTVTVSSASTKGPSVFPLAPSSKSTSGGTAALGCLVKDYFPEPVTVSWNSGALTSGVHTFPAVLQSSGLYSLSSVVTVPSSSLGTQTYICNVNHKPSNTKVDKKVEPKSC

SEQ ID NO: 1668 - protein, 220 aa, synthetic construct
EVQLVESGGGLVQPGGSLRLSCAASGFTFSNFGMHWVRQAPGKGLEWVSYISSGSSTIDYADTLKGRFTISRDNSKNTLYLQMNSLRAEDTAVYYCARRGEGAMDYWGQGTTVTVSSASTKGPSVFPLAPSSKSTSGGTAALGCLVKDYFPEPVTVSWNSGALTSGVHTFPAVLQSSGLYSLSSVVTVPSSSLGTQTYICNVNHKPSNTKVDKKVEPKSC

SEQ ID NO: 1669 - protein, 220 aa, synthetic construct
EVQLVESGGGLVQPGGSLRLSCAASGFTFSNFGMHWVRQAPGKGLEWVSYISSGSSTIFYADTLKGRFTISRDNSKNTLYLQMNSLRAEDTAVYYCARRGEGAMDYWGQGTTVTVSSASTKGPSVFPLAPSSKSTSGGTAALGCLVKDYFPEPVTVSWNSGALTSGVHTFPAVLQSSGLYSLSSVVTVPSSSLGTQTYICNVNHKPSNTKVDKKVEPKSC

SEQ ID NO: 1670 - protein, 220 aa, synthetic construct
EVQLVESGGGLVQPGGSLRLSCAASGFTFSNFGMHWVRQAPGKGLEWVSYISSGSSTIGYADTLKGRFTISRDNSKNTLYLQMNSLRAEDTAVYYCARRGEGAMDYWGQGTTVTVSSASTKGPSVFPLAPSSKSTSGGTAALGCLVKDYFPEPVTVSWNSGALTSGVHTFPAVLQSSGLYSLSSVVTVPSSSLGTQTYICNVNHKPSNTKVDKKVEPKSC

SEQ ID NO: 1671 - protein, 220 aa, synthetic construct
EVQLVESGGGLVQPGGSLRLSCAASGFTFSNFGMHWVRQAPGKGLEWVSYISSGSSTIHYADTLKGRFTISRDNSKNTLYLQMNSLRAEDTAVYYCARRGEGAMDYWGQGTTVTVSSASTKGPSVFPLAPSSKSTSGGTAALGCLVKDYFPEPVTVSWNSGALTSGVHTFPAVLQSSGLYSLSSVVTVPSSSLGTQTYICNVNHKPSNTKVDKKVEPKSC

SEQ ID NO: 1672 - protein, 220 aa, synthetic construct
EVQLVESGGGLVQPGGSLRLSCAASGFTFSNFGMHWVRQAPGKGLEWVSYISSGSSTIIYADTLKGRFTISRDNSKNTLYLQMNSLRAEDTAVYYCARRGEGAMDYWGQGTTVTVSSASTKGPSVFPLAPSSKSTSGGTAALGCLVKDYFPEPVTVSWNSGALTSGVHTFPAVLQSSGLYSLSSVVTVPSSSLGTQTYICNVNHKPSNTKVDKKVEPKSC

SEQ ID NO: 1673 - protein, 220 aa, synthetic construct
EVQLVESGGGLVQPGGSLRLSCAASGFTFSNFGMHWVRQAPGKGLEWVSYISSGSSTIKYADTLKGRFTISRDNSKNTLYLQMNSLRAEDTAVYYCARRGEGAMDYWGQGTTVTVSSASTKGPSVFPLAPSSKSTSGGTAALGCLVKDYFPEPVTVSWNSGALTSGVHTFPAVLQSSGLYSLSSVVTVPSSSLGTQTYICNVNHKPSNTKVDKKVEPKSC

SEQ ID NO: 1674 - protein, 220 aa, synthetic construct
EVQLVESGGGLVQPGGSLRLSCAASGFTFSNFGMHWVRQAPGKGLEWVSYISSGSSTIMYADTLKGRFTISRDNSKNTLYLQMNSLRAEDTAVYYCARRGEGAMDYWGQGTTVTVSSASTKGPSVFPLAPSSKSTSGGTAALGCLVKDYFPEPVTVSWNSGALTSGVHTFPAVLQSSGLYSLSSVVTVPSSSLGTQTYICNVNHKPSNTKVDKKVEPKSC

SEQ ID NO: 1675 - protein, 220 aa, synthetic construct
EVQLVESGGGLVQPGGSLRLSCAASGFTFSNFGMHWVRQAPGKGLEWVSYISSGSSTIPYADTLKGRFTISRDNSKNTLYLQMNSLRAEDTAVYYCARRGEGAMDYWGQGTTVTVSSASTKGPSVFPLAPSSKSTSGGTAALGCLVKDYFPEPVTVSWNSGALTSGVHTFPAVLQSSGLYSLSSVVTVPSSSLGTQTYICNVNHKPSNTKVDKKVEPKSC

SEQ ID NO: 1676 - protein, 220 aa, synthetic construct
EVQLVESGGGLVQPGGSLRLSCAASGFTFSNFGMHWVRQAPGKGLEWVSYISSGSSTIQYADTLKGRFTISRDNSKNTLYLQMNSLRAEDTAVYYCARRGEGAMDYWGQGTTVTVSSASTKGPSVFPLAPSSKSTSGGTAALGCLVKDYFPEPVTVSWNSGALTSGVHTFPAVLQSSGLYSLSSVVTVPSSSLGTQTYICNVNHKPSNTKVDKKVEPKSC

SEQ ID NO: 1677 - protein, 220 aa, synthetic construct
EVQLVESGGGLVQPGGSLRLSCAASGFTFSNFGMHWVRQAPGKGLEWVSYISSGSSTIRYADTLKGRFTISRDNSKNTLYLQMNSLRAEDTAVYYCARRGEGAMDYWGQGTTVTVSSASTKGPSVFPLAPSSKSTSGGTAALGCLVKDYFPEPVTVSWNSGALTSGVHTFPAVLQSSGLYSLSSVVTVPSSSLGTQTYICNVNHKPSNTKVDKKVEPKSC

SEQ ID NO: 1678 - protein, 220 aa, synthetic construct
EVQLVESGGGLVQPGGSLRLSCAASGFTFSNFGMHWVRQAPGKGLEWVSYISSGSSTISYADTLKGRFTISRDNSKNTLYLQMNSLRAEDTAVYYCARRGEGAMDYWGQGTTVTVSSASTKGPSVFPLAPSSKSTSGGTAALGCLVKDYFPEPVTVSWNSGALTSGVHTFPAVLQSSGLYSLSSVVTVPSSSLGTQTYICNVNHKPSNTKVDKKVEPKSC

SEQ ID NO: 1679 - protein, 220 aa, synthetic construct
EVQLVESGGGLVQPGGSLRLSCAASGFTFSNFGMHWVRQAPGKGLEWVSYISSGSSTITYADTLKGRFTISRDNSKNTLYLQMNSLRAEDTAVYYCARRGEGAMDYWGQGTTVTVSSASTKGPSVFPLAPSSKSTSGGTAALGCLVKDYFPEPVTVSWNSGALTSGVHTFPAVLQSSGLYSLSSVVTVPSSSLGTQTYICNVNHKPSNTKVDKKVEPKSC

SEQ ID NO: 1680 - protein, 220 aa, synthetic construct
EVQLVESGGGLVQPGGSLRLSCAASGFTFSNFGMHWVRQAPGKGLEWVSYISSGSSTIVYADTLKGRFTISRDNSKNTLYLQMNSLRAEDTAVYYCARRGEGAMDYWGQGTTVTVSSASTKGPSVFPLAPSSKSTSGGTAALGCLVKDYFPEPVTVSWNSGALTSGVHTFPAVLQSSGLYSLSSVVTVPSSSLGTQTYICNVNHKPSNTKVDKKVEPKSC

SEQ ID NO: 1681 - protein, 220 aa, synthetic construct
EVQLVESGGGLVQPGGSLRLSCAASGFTFSNFGMHWVRQAPGKGLEWVSYISSGSSTIWYADTLKGRFTISRDNSKNTLYLQMNSLRAEDTAVYYCARRGEGAMDYWGQGTTVTVSSASTKGPSVFPLAPSSKSTSGGTAALGCLVKDYFPEPVTVSWNSGALTSGVHTFPAVLQSSGLYSLSSVVTVPSSSLGTQTYICNVNHKPSNTKVDKKVEPKSC

SEQ ID NO: 1682 - protein, 220 aa, synthetic construct
EVQLVESGGGLVQPGGSLRLSCAASGFTFSNFGMHWVRQAPGKGLEWVSYISSGSSTIYYDDTLKGRFTISRDNSKNTLYLQMNSLRAEDTAVYYCARRGEGAMDYWGQGTTVTVSSASTKGPSVFPLAPSSKSTSGGTAALGCLVKDYFPEPVTVSWNSGALTSGVHTFPAVLQSSGLYSLSSVVTVPSSSLGTQTYICNVNHKPSNTKVDKKVEPKSC

SEQ ID NO: 1683 - protein, 220 aa, synthetic construct
EVQLVESGGGLVQPGGSLRLSCAASGFTFSNFGMHWVRQAPGKGLEWVSYISSGSSTIYYEDTLKGRFTISRDNSKNTLYLQMNSLRAEDTAVYYCARRGEGAMDYWGQGTTVTVSSASTKGPSVFPLAPSSKSTSGGTAALGCLVKDYFPEPVTVSWNSGALTSGVHTFPAVLQSSGLYSLSSVVTVPSSSLGTQTYICNVNHKPSNTKVDKKVEPKSC

SEQ ID NO: 1684 - protein, 220 aa, synthetic construct
EVQLVESGGGLVQPGGSLRLSCAASGFTFSNFGMHWVRQAPGKGLEWVSYISSGSSTIYYFDTLKGRFTISRDNSKNTLYLQMNSLRAEDTAVYYCARRGEGAMDYWGQGTTVTVSSASTKGPSVFPLAPSSKSTSGGTAALGCLVKDYFPEPVTVSWNSGALTSGVHTFPAVLQSSGLYSLSSVVTVPSSSLGTQTYICNVNHKPSNTKVDKKVEPKSC

SEQ ID NO: 1685 - protein, 220 aa, synthetic construct
EVQLVESGGGLVQPGGSLRLSCAASGFTFSNFGMHWVRQAPGKGLEWVSYISSGSSTIYYGDTLKGRFTISRDNSKNTLYLQMNSLRAEDTAVYYCARRGEGAMDYWGQGTTVTVSSASTKGPSVFPLAPSSKSTSGGTAALGCLVKDYFPEPVTVSWNSGALTSGVHTFPAVLQSSGLYSLSSVVTVPSSSLGTQTYICNVNHKPSNTKVDKKVEPKSC

SEQ ID NO: 1686 - protein, 220 aa, synthetic construct
EVQLVESGGGLVQPGGSLRLSCAASGFTFSNFGMHWVRQAPGKGLEWVSYISSGSSTIYYHDTLKGRFTISRDNSKNTLYLQMNSLRAEDTAVYYCARRGEGAMDYWGQGTTVTVSSASTKGPSVFPLAPSSKSTSGGTAALGCLVKDYFPEPVTVSWNSGALTSGVHTFPAVLQSSGLYSLSSVVTVPSSSLGTQTYICNVNHKPSNTKVDKKVEPKSC

SEQ ID NO: 1687 - protein, 220 aa, synthetic construct
EVQLVESGGGLVQPGGSLRLSCAASGFTFSNFGMHWVRQAPGKGLEWVSYISSGSSTIYYIDTLKGRFTISRDNSKNTLYLQMNSLRAEDTAVYYCARRGEGAMDYWGQGTTVTVSSASTKGPSVFPLAPSSKSTSGGTAALGCLVKDYFPEPVTVSWNSGALTSGVHTFPAVLQSSGLYSLSSVVTVPSSSLGTQTYICNVNHKPSNTKVDKKVEPKSC

SEQ ID NO: 1688 - protein, 220 aa, synthetic construct
EVQLVESGGGLVQPGGSLRLSCAASGFTFSNFGMHWVRQAPGKGLEWVSYISSGSSTIYYLDTLKGRFTISRDNSKNTLYLQMNSLRAEDTAVYYCARRGEGAMDYWGQGTTVTVSSASTKGPSVFPLAPSSKSTSGGTAALGCLVKDYFPEPVTVSWNSGALTSGVHTFPAVLQSSGLYSLSSVVTVPSSSLGTQTYICNVNHKPSNTKVDKKVEPKSC

SEQ ID NO: 1689 - protein, 220 aa, synthetic construct
EVQLVESGGGLVQPGGSLRLSCAASGFTFSNFGMHWVRQAPGKGLEWVSYISSGSSTIYYMDTLKGRFTISRDNSKNTLYLQMNSLRAEDTAVYYCARRGEGAMDYWGQGTTVTVSSASTKGPSVFPLAPSSKSTSGGTAALGCLVKDYFPEPVTVSWNSGALTSGVHTFPAVLQSSGLYSLSSVVTVPSSSLGTQTYICNVNHKPSNTKVDKKVEPKSC

SEQ ID NO: 1690 - protein, 220 aa, synthetic construct
EVQLVESGGGLVQPGGSLRLSCAASGFTFSNFGMHWVRQAPGKGLEWVSYISSGSSTIYYNDTLKGRFTISRDNSKNTLYLQMNSLRAEDTAVYYCARRGEGAMDYWGQGTTVTVSSASTKGPSVFPLAPSSKSTSGGTAALGCLVKDYFPEPVTVSWNSGALTSGVHTFPAVLQSSGLYSLSSVVTVPSSSLGTQTYICNVNHKPSNTKVDKKVEPKSC

SEQ ID NO: 1691 - protein, 220 aa, synthetic construct
EVQLVESGGGLVQPGGSLRLSCAASGFTFSNFGMHWVRQAPGKGLEWVSYISSGSSTIYYPDTLKGRFTISRDNSKNTLYLQMNSLRAEDTAVYYCARRGEGAMDYWGQGTTVTVSSASTKGPSVFPLAPSSKSTSGGTAALGCLVKDYFPEPVTVSWNSGALTSGVHTFPAVLQSSGLYSLSSVVTVPSSSLGTQTYICNVNHKPSNTKVDKKVEPKSC

SEQ ID NO: 1692 - protein, 220 aa, synthetic construct
EVQLVESGGGLVQPGGSLRLSCAASGFTFSNFGMHWVRQAPGKGLEWVSYISSGSSTIYYQDTLKGRFTISRDNSKNTLYLQMNSLRAEDTAVYYCARRGEGAMDYWGQGTTVTVSSASTKGPSVFPLAPSSKSTSGGTAALGCLVKDYFPEPVTVSWNSGALTSGVHTFPAVLQSSGLYSLSSVVTVPSSSLGTQTYICNVNHKPSNTKVDKKVEPKSC

SEQ ID NO: 1693 - protein, 220 aa, synthetic construct
EVQLVESGGGLVQPGGSLRLSCAASGFTFSNFGMHWVRQAPGKGLEWVSYISSGSSTIYYSDTLKGRFTISRDNSKNTLYLQMNSLRAEDTAVYYCARRGEGAMDYWGQGTTVTVSSASTKGPSVFPLAPSSKSTSGGTAALGCLVKDYFPEPVTVSWNSGALTSGVHTFPAVLQSSGLYSLSSVVTVPSSSLGTQTYICNVNHKPSNTKVDKKVEPKSC

SEQ ID NO: 1694 - protein, 220 aa, synthetic construct
EVQLVESGGGLVQPGGSLRLSCAASGFTFSNFGMHWVRQAPGKGLEWVSYISSGSSTIYYTDTLKGRFTISRDNSKNTLYLQMNSLRAEDTAVYYCARRGEGAMDYWGQGTTVTVSSASTKGPSVFPLAPSSKSTSGGTAALGCLVKDYFPEPVTVSWNSGALTSGVHTFPAVLQSSGLYSLSSVVTVPSSSLGTQTYICNVNHKPSNTKVDKKVEPKSC

SEQ ID NO: 1695 - protein, 220 aa, synthetic construct
EVQLVESGGGLVQPGGSLRLSCAASGFTFSNFGMHWVRQAPGKGLEWVSYISSGSSTIYYVDTLKGRFTISRDNSKNTLYLQMNSLRAEDTAVYYCARRGEGAMDYWGQGTTVTVSSASTKGPSVFPLAPSSKSTSGGTAALGCLVKDYFPEPVTVSWNSGALTSGVHTFPAVLQSSGLYSLSSVVTVPSSSLGTQTYICNVNHKPSNTKVDKKVEPKSC

SEQ ID NO: 1696 - protein, 220 aa, synthetic construct
EVQLVESGGGLVQPGGSLRLSCAASGFTFSNFGMHWVRQAPGKGLEWVSYISSGSSTIYYWDTLKGRFTISRDNSKNTLYLQMNSLRAEDTAVYYCARRGEGAMDYWGQGTTVTVSSASTKGPSVFPLAPSSKSTSGGTAALGCLVKDYFPEPVTVSWNSGALTSGVHTFPAVLQSSGLYSLSSVVTVPSSSLGTQTYICNVNHKPSNTKVDKKVEPKSC

SEQ ID NO: 1697 - protein, 220 aa, synthetic construct
EVQLVESGGGLVQPGGSLRLSCAASGFTFSNFGMHWVRQAPGKGLEWVSYISSGSSTIYYYDTLKGRFTISRDNSKNTLYLQMNSLRAEDTAVYYCARRGEGAMDYWGQGTTVTVSSASTKGPSVFPLAPSSKSTSGGTAALGCLVKDYFPEPVTVSWNSGALTSGVHTFPAVLQSSGLYSLSSVVTVPSSSLGTQTYICNVNHKPSNTKVDKKVEPKSC

SEQ ID NO: 1698 - protein, 220 aa, synthetic construct
EVQLVESGGGLVQPGGSLRLSCAASGFTFSNFGMHWVRQAPGKGLEWVSYISSGSSTIYYAETLKGRFTISRDNSKNTLYLQMNSLRAEDTAVYYCARRGEGAMDYWGQGTTVTVSSASTKGPSVFPLAPSSKSTSGGTAALGCLVKDYFPEPVTVSWNSGALTSGVHTFPAVLQSSGLYSLSSVVTVPSSSLGTQTYICNVNHKPSNTKVDKKVEPKSC

SEQ ID NO: 1699 - protein, 220 aa, synthetic construct
EVQLVESGGGLVQPGGSLRLSCAASGFTFSNFGMHWVRQAPGKGLEWVSYISSGSSTIYYAFTLKGRFTISRDNSKNTLYLQMNSLRAEDTAVYYCARRGEGAMDYWGQGTTVTVSSASTKGPSVFPLAPSSKSTSGGTAALGCLVKDYFPEPVTVSWNSGALTSGVHTFPAVLQSSGLYSLSSVVTVPSSSLGTQTYICNVNHKPSNTKVDKKVEPKSC

SEQ ID NO: 1700 - protein, 220 aa, synthetic construct
EVQLVESGGGLVQPGGSLRLSCAASGFTFSNFGMHWVRQAPGKGLEWVSYISSGSSTIYYAGTLKGRFTISRDNSKNTLYLQMNSLRAEDTAVYYCARRGEGAMDYWGQGTTVTVSSASTKGPSVFPLAPSSKSTSGGTAALGCLVKDYFPEPVTVSWNSGALTSGVHTFPAVLQSSGLYSLSSVVTVPSSSLGTQTYICNVNHKPSNTKVDKKVEPKSC

SEQ ID NO: 1701 - protein, 220 aa, synthetic construct
EVQLVESGGGLVQPGGSLRLSCAASGFTFSNFGMHWVRQAPGKGLEWVSYISSGSSTIYYAHTLKGRFTISRDNSKNTLYLQMNSLRAEDTAVYYCARRGEGAMDYWGQGTTVTVSSASTKGPSVFPLAPSSKSTSGGTAALGCLVKDYFPEPVTVSWNSGALTSGVHTFPAVLQSSGLYSLSSVVTVPSSSLGTQTYICNVNHKPSNTKVDKKVEPKSC

SEQ ID NO: 1702 - protein, 220 aa, synthetic construct
EVQLVESGGGLVQPGGSLRLSCAASGFTFSNFGMHWVRQAPGKGLEWVSYISSGSSTIYYAITLKGRFTISRDNSKNTLYLQMNSLRAEDTAVYYCARRGEGAMDYWGQGTTVTVSSASTKGPSVFPLAPSSKSTSGGTAALGCLVKDYFPEPVTVSWNSGALTSGVHTFPAVLQSSGLYSLSSVVTVPSSSLGTQTYICNVNHKPSNTKVDKKVEPKSC

SEQ ID NO: 1703 - protein, 220 aa, synthetic construct
EVQLVESGGGLVQPGGSLRLSCAASGFTFSNFGMHWVRQAPGKGLEWVSYISSGSSTIYYAKTLKGRFTISRDNSKNTLYLQMNSLRAEDTAVYYCARRGEGAMDYWGQGTTVTVSSASTKGPSVFPLAPSSKSTSGGTAALGCLVKDYFPEPVTVSWNSGALTSGVHTFPAVLQSSGLYSLSSVVTVPSSSLGTQTYICNVNHKPSNTKVDKKVEPKSC

SEQ ID NO: 1704 - protein, 220 aa, synthetic construct
EVQLVESGGGLVQPGGSLRLSCAASGFTFSNFGMHWVRQAPGKGLEWVSYISSGSSTIYYALTLKGRFTISRDNSKNTLYLQMNSLRAEDTAVYYCARRGEGAMDYWGQGTTVTVSSASTKGPSVFPLAPSSKSTSGGTAALGCLVKDYFPEPVTVSWNSGALTSGVHTFPAVLQSSGLYSLSSVVTVPSSSLGTQTYICNVNHKPSNTKVDKKVEPKSC

SEQ ID NO: 1705 - protein, 220 aa, synthetic construct
EVQLVESGGGLVQPGGSLRLSCAASGFTFSNFGMHWVRQAPGKGLEWVSYISSGSSTIYYANTLKGRFTISRDNSKNTLYLQMNSLRAEDTAVYYCARRGEGAMDYWGQGTTVTVSSASTKGPSVFPLAPSSKSTSGGTAALGCLVKDYFPEPVTVSWNSGALTSGVHTFPAVLQSSGLYSLSSVVTVPSSSLGTQTYICNVNHKPSNTKVDKKVEPKSC

SEQ ID NO: 1706 - protein, 220 aa, synthetic construct
EVQLVESGGGLVQPGGSLRLSCAASGFTFSNFGMHWVRQAPGKGLEWVSYISSGSSTIYYAPTLKGRFTISRDNSKNTLYLQMNSLRAEDTAVYYCARRGEGAMDYWGQGTTVTVSSASTKGPSVFPLAPSSKSTSGGTAALGCLVKDYFPEPVTVSWNSGALTSGVHTFPAVLQSSGLYSLSSVVTVPSSSLGTQTYICNVNHKPSNTKVDKKVEPKSC

SEQ ID NO: 1707 - protein, 220 aa, synthetic construct
EVQLVESGGGLVQPGGSLRLSCAASGFTFSNFGMHWVRQAPGKGLEWVSYISSGSSTIYYAQTLKGRFTISRDNSKNTLYLQMNSLRAEDTAVYYCARRGEGAMDYWGQGTTVTVSSASTKGPSVFPLAPSSKSTSGGTAALGCLVKDYFPEPVTVSWNSGALTSGVHTFPAVLQSSGLYSLSSVVTVPSSSLGTQTYICNVNHKPSNTKVDKKVEPKSC

SEQ ID NO: 1708 - protein, 220 aa, synthetic construct
EVQLVESGGGLVQPGGSLRLSCAASGFTFSNFGMHWVRQAPGKGLEWVSYISSGSSTIYYARTLKGRFTISRDNSKNTLYLQMNSLRAEDTAVYYCARRGEGAMDYWGQGTTVTVSSASTKGPSVFPLAPSSKSTSGGTAALGCLVKDYFPEPVTVSWNSGALTSGVHTFPAVLQSSGLYSLSSVVTVPSSSLGTQTYICNVNHKPSNTKVDKKVEPKSC

SEQ ID NO: 1709 - protein, 220 aa, synthetic construct
EVQLVESGGGLVQPGGSLRLSCAASGFTFSNFGMHWVRQAPGKGLEWVSYISSGSSTIYYATTLKGRFTISRDNSKNTLYLQMNSLRAEDTAVYYCARRGEGAMDYWGQGTTVTVSSASTKGPSVFPLAPSSKSTSGGTAALGCLVKDYFPEPVTVSWNSGALTSGVHTFPAVLQSSGLYSLSSVVTVPSSSLGTQTYICNVNHKPSNTKVDKKVEPKSC

SEQ ID NO: 1710 - protein, 220 aa, synthetic construct
EVQLVESGGGLVQPGGSLRLSCAASGFTFSNFGMHWVRQAPGKGLEWVSYISSGSSTIYYAVTLKGRFTISRDNSKNTLYLQMNSLRAEDTAVYYCARRGEGAMDYWGQGTTVTVSSASTKGPSVFPLAPSSKSTSGGTAALGCLVKDYFPEPVTVSWNSGALTSGVHTFPAVLQSSGLYSLSSVVTVPSSSLGTQTYICNVNHKPSNTKVDKKVEPKSC

SEQ ID NO: 1711 - protein, 220 aa, synthetic construct
EVQLVESGGGLVQPGGSLRLSCAASGFTFSNFGMHWVRQAPGKGLEWVSYISSGSSTIYYAWTLKGRFTISRDNSKNTLYLQMNSLRAEDTAVYYCARRGEGAMDYWGQGTTVTVSSASTKGPSVFPLAPSSKSTSGGTAALGCLVKDYFPEPVTVSWNSGALTSGVHTFPAVLQSSGLYSLSSVVTVPSSSLGTQTYICNVNHKPSNTKVDKKVEPKSC

SEQ ID NO: 1712 - protein, 220 aa, synthetic construct
EVQLVESGGGLVQPGGSLRLSCAASGFTFSNFGMHWVRQAPGKGLEWVSYISSGSSTIYYAYTLKGRFTISRDNSKNTLYLQMNSLRAEDTAVYYCARRGEGAMDYWGQGTTVTVSSASTKGPSVFPLAPSSKSTSGGTAALGCLVKDYFPEPVTVSWNSGALTSGVHTFPAVLQSSGLYSLSSVVTVPSSSLGTQTYICNVNHKPSNTKVDKKVEPKSC

SEQ ID NO: 1713 - protein, 220 aa, synthetic construct
EVQLVESGGGLVQPGGSLRLSCAASGFTFSNFGMHWVRQAPGKGLEWVSYISSGSSTIYYADALKGRFTISRDNSKNTLYLQMNSLRAEDTAVYYCARRGEGAMDYWGQGTTVTVSSASTKGPSVFPLAPSSKSTSGGTAALGCLVKDYFPEPVTVSWNSGALTSGVHTFPAVLQSSGLYSLSSVVTVPSSSLGTQTYICNVNHKPSNTKVDKKVEPKSC

SEQ ID NO: 1714 - protein, 220 aa, synthetic construct
EVQLVESGGGLVQPGGSLRLSCAASGFTFSNFGMHWVRQAPGKGLEWVSYISSGSSTIYYADDLKGRFTISRDNSKNTLYLQMNSLRAEDTAVYYCARRGEGAMDYWGQGTTVTVSSASTKGPSVFPLAPSSKSTSGGTAALGCLVKDYFPEPVTVSWNSGALTSGVHTFPAVLQSSGLYSLSSVVTVPSSSLGTQTYICNVNHKPSNTKVDKKVEPKSC

SEQ ID NO: 1715 - protein, 220 aa, synthetic construct
EVQLVESGGGLVQPGGSLRLSCAASGFTFSNFGMHWVRQAPGKGLEWVSYISSGSSTIYYADELKGRFTISRDNSKNTLYLQMNSLRAEDTAVYYCARRGEGAMDYWGQGTTVTVSSASTKGPSVFPLAPSSKSTSGGTAALGCLVKDYFPEPVTVSWNSGALTSGVHTFPAVLQSSGLYSLSSVVTVPSSSLGTQTYICNVNHKPSNTKVDKKVEPKSC

SEQ ID NO: 1716 - protein, 220 aa, synthetic construct
EVQLVESGGGLVQPGGSLRLSCAASGFTFSNFGMHWVRQAPGKGLEWVSYISSGSSTIYYADFLKGRFTISRDNSKNTLYLQMNSLRAEDTAVYYCARRGEGAMDYWGQGTTVTVSSASTKGPSVFPLAPSSKSTSGGTAALGCLVKDYFPEPVTVSWNSGALTSGVHTFPAVLQSSGLYSLSSVVTVPSSSLGTQTYICNVNHKPSNTKVDKKVEPKSC

SEQ ID NO: 1717 - protein, 220 aa, synthetic construct
EVQLVESGGGLVQPGGSLRLSCAASGFTFSNFGMHWVRQAPGKGLEWVSYISSGSSTIYYADGLKGRFTISRDNSKNTLYLQMNSLRAEDTAVYYCARRGEGAMDYWGQGTTVTVSSASTKGPSVFPLAPSSKSTSGGTAALGCLVKDYFPEPVTVSWNSGALTSGVHTFPAVLQSSGLYSLSSVVTVPSSSLGTQTYICNVNHKPSNTKVDKKVEPKSC

SEQ ID NO: 1718 - protein, 220 aa, synthetic construct
EVQLVESGGGLVQPGGSLRLSCAASGFTFSNFGMHWVRQAPGKGLEWVSYISSGSSTIYYADHLKGRFTISRDNSKNTLYLQMNSLRAEDTAVYYCARRGEGAMDYWGQGTTVTVSSASTKGPSVFPLAPSSKSTSGGTAALGCLVKDYFPEPVTVSWNSGALTSGVHTFPAVLQSSGLYSLSSVVTVPSSSLGTQTYICNVNHKPSNTKVDKKVEPKSC

SEQ ID NO: 1719 - protein, 220 aa, synthetic construct
EVQLVESGGGLVQPGGSLRLSCAASGFTFSNFGMHWVRQAPGKGLEWVSYISSGSSTIYYADILKGRFTISRDNSKNTLYLQMNSLRAEDTAVYYCARRGEGAMDYWGQGTTVTVSSASTKGPSVFPLAPSSKSTSGGTAALGCLVKDYFPEPVTVSWNSGALTSGVHTFPAVLQSSGLYSLSSVVTVPSSSLGTQTYICNVNHKPSNTKVDKKVEPKSC

SEQ ID NO: 1720 - protein, 220 aa, synthetic construct
EVQLVESGGGLVQPGGSLRLSCAASGFTFSNFGMHWVRQAPGKGLEWVSYISSGSSTIYYADLLKGRFTISRDNSKNTLYLQMNSLRAEDTAVYYCARRGEGAMDYWGQGTTVTVSSASTKGPSVFPLAPSSKSTSGGTAALGCLVKDYFPEPVTVSWNSGALTSGVHTFPAVLQSSGLYSLSSVVTVPSSSLGTQTYICNVNHKPSNTKVDKKVEPKSC

SEQ ID NO: 1721 - protein, 220 aa, synthetic construct
EVQLVESGGGLVQPGGSLRLSCAASGFTFSNFGMHWVRQAPGKGLEWVSYISSGSSTIYYADMLKGRFTISRDNSKNTLYLQMNSLRAEDTAVYYCARRGEGAMDYWGQGTTVTVSSASTKGPSVFPLAPSSKSTSGGTAALGCLVKDYFPEPVTVSWNSGALTSGVHTFPAVLQSSGLYSLSSVVTVPSSSLGTQTYICNVNHKPSNTKVDKKVEPKSC

SEQ ID NO: 1722 - protein, 220 aa, synthetic construct
EVQLVESGGGLVQPGGSLRLSCAASGFTFSNFGMHWVRQAPGKGLEWVSYISSGSSTIYYADNLKGRFTISRDNSKNTLYLQMNSLRAEDTAVYYCARRGEGAMDYWGQGTTVTVSSASTKGPSVFPLAPSSKSTSGGTAALGCLVKDYFPEPVTVSWNSGALTSGVHTFPAVLQSSGLYSLSSVVTVPSSSLGTQTYICNVNHKPSNTKVDKKVEPKSC

SEQ ID NO: 1723 - protein, 220 aa, synthetic construct
EVQLVESGGGLVQPGGSLRLSCAASGFTFSNFGMHWVRQAPGKGLEWVSYISSGSSTIYYADPLKGRFTISRDNSKNTLYLQMNSLRAEDTAVYYCARRGEGAMDYWGQGTTVTVSSASTKGPSVFPLAPSSKSTSGGTAALGCLVKDYFPEPVTVSWNSGALTSGVHTFPAVLQSSGLYSLSSVVTVPSSSLGTQTYICNVNHKPSNTKVDKKVEPKSC

SEQ ID NO: 1724 - protein, 220 aa, synthetic construct
EVQLVESGGGLVQPGGSLRLSCAASGFTFSNFGMHWVRQAPGKGLEWVSYISSGSSTIYYADQLKGRFTISRDNSKNTLYLQMNSLRAEDTAVYYCARRGEGAMDYWGQGTTVTVSSASTKGPSVFPLAPSSKSTSGGTAALGCLVKDYFPEPVTVSWNSGALTSGVHTFPAVLQSSGLYSLSSVVTVPSSSLGTQTYICNVNHKPSNTKVDKKVEPKSC

SEQ ID NO: 1725 - protein, 220 aa, synthetic construct
EVQLVESGGGLVQPGGSLRLSCAASGFTFSNFGMHWVRQAPGKGLEWVSYISSGSSTIYYADRLKGRFTISRDNSKNTLYLQMNSLRAEDTAVYYCARRGEGAMDYWGQGTTVTVSSASTKGPSVFPLAPSSKSTSGGTAALGCLVKDYFPEPVTVSWNSGALTSGVHTFPAVLQSSGLYSLSSVVTVPSSSLGTQTYICNVNHKPSNTKVDKKVEPKSC

SEQ ID NO: 1726 - protein, 220 aa, synthetic construct
EVQLVESGGGLVQPGGSLRLSCAASGFTFSNFGMHWVRQAPGKGLEWVSYISSGSSTIYYADSLKGRFTISRDNSKNTLYLQMNSLRAEDTAVYYCARRGEGAMDYWGQGTTVTVSSASTKGPSVFPLAPSSKSTSGGTAALGCLVKDYFPEPVTVSWNSGALTSGVHTFPAVLQSSGLYSLSSVVTVPSSSLGTQTYICNVNHKPSNTKVDKKVEPKSC

SEQ ID NO: 1727 - protein, 220 aa, synthetic construct
EVQLVESGGGLVQPGGSLRLSCAASGFTFSNFGMHWVRQAPGKGLEWVSYISSGSSTIYYADVLKGRFTISRDNSKNTLYLQMNSLRAEDTAVYYCARRGEGAMDYWGQGTTVTVSSASTKGPSVFPLAPSSKSTSGGTAALGCLVKDYFPEPVTVSWNSGALTSGVHTFPAVLQSSGLYSLSSVVTVPSSSLGTQTYICNVNHKPSNTKVDKKVEPKSC

SEQ ID NO: 1728 - protein, 220 aa, synthetic construct
EVQLVESGGGLVQPGGSLRLSCAASGFTFSNFGMHWVRQAPGKGLEWVSYISSGSSTIYYADWLKGRFTISRDNSKNTLYLQMNSLRAEDTAVYYCARRGEGAMDYWGQGTTVTVSSASTKGPSVFPLAPSSKSTSGGTAALGCLVKDYFPEPVTVSWNSGALTSGVHTFPAVLQSSGLYSLSSVVTVPSSSLGTQTYICNVNHKPSNTKVDKKVEPKSC

SEQ ID NO: 1729 - protein, 220 aa, synthetic construct
EVQLVESGGGLVQPGGSLRLSCAASGFTFSNFGMHWVRQAPGKGLEWVSYISSGSSTIYYADYLKGRFTISRDNSKNTLYLQMNSLRAEDTAVYYCARRGEGAMDYWGQGTTVTVSSASTKGPSVFPLAPSSKSTSGGTAALGCLVKDYFPEPVTVSWNSGALTSGVHTFPAVLQSSGLYSLSSVVTVPSSSLGTQTYICNVNHKPSNTKVDKKVEPKSC

SEQ ID NO: 1730 - protein, 220 aa, synthetic construct
EVQLVESGGGLVQPGGSLRLSCAASGFTFSNFGMHWVRQAPGKGLEWVSYISSGSSTIYYADTLKGRFTISRDNSKNTLYLQMNSLRAEDTAVYYCARAGEGAMDYWGQGTTVTVSSASTKGPSVFPLAPSSKSTSGGTAALGCLVKDYFPEPVTVSWNSGALTSGVHTFPAVLQSSGLYSLSSVVTVPSSSLGTQTYICNVNHKPSNTKVDKKVEPKSC

SEQ ID NO: 1731 - protein, 220 aa, synthetic construct
EVQLVESGGGLVQPGGSLRLSCAASGFTFSNFGMHWVRQAPGKGLEWVSYISSGSSTIYYADTLKGRFTISRDNSKNTLYLQMNSLRAEDTAVYYCARDGEGAMDYWGQGTTVTVSSASTKGPSVFPLAPSSKSTSGGTAALGCLVKDYFPEPVTVSWNSGALTSGVHTFPAVLQSSGLYSLSSVVTVPSSSLGTQTYICNVNHKPSNTKVDKKVEPKSC

SEQ ID NO: 1732 - protein, 220 aa, synthetic construct
EVQLVESGGGLVQPGGSLRLSCAASGFTFSNFGMHWVRQAPGKGLEWVSYISSGSSTIYYADTLKGRFTISRDNSKNTLYLQMNSLRAEDTAVYYCARGGEGAMDYWGQGTTVTVSSASTKGPSVFPLAPSSKSTSGGTAALGCLVKDYFPEPVTVSWNSGALTSGVHTFPAVLQSSGLYSLSSVVTVPSSSLGTQTYICNVNHKPSNTKVDKKVEPKSC

SEQ ID NO: 1733 - protein, 220 aa, synthetic construct
EVQLVESGGGLVQPGGSLRLSCAASGFTFSNFGMHWVRQAPGKGLEWVSYISSGSSTIYYADTLKGRFTISRDNSKNTLYLQMNSLRAEDTAVYYCARHGEGAMDYWGQGTTVTVSSASTKGPSVFPLAPSSKSTSGGTAALGCLVKDYFPEPVTVSWNSGALTSGVHTFPAVLQSSGLYSLSSVVTVPSSSLGTQTYICNVNHKPSNTKVDKKVEPKSC

SEQ ID NO: 1734 - protein, 220 aa, synthetic construct
EVQLVESGGGLVQPGGSLRLSCAASGFTFSNFGMHWVRQAPGKGLEWVSYISSGSSTIYYADTLKGRFTISRDNSKNTLYLQMNSLRAEDTAVYYCARIGEGAMDYWGQGTTVTVSSASTKGPSVFPLAPSSKSTSGGTAALGCLVKDYFPEPVTVSWNSGALTSGVHTFPAVLQSSGLYSLSSVVTVPSSSLGTQTYICNVNHKPSNTKVDKKVEPKSC

SEQ ID NO: 1735 - protein, 220 aa, synthetic construct
EVQLVESGGGLVQPGGSLRLSCAASGFTFSNFGMHWVRQAPGKGLEWVSYISSGSSTIYYADTLKGRFTISRDNSKNTLYLQMNSLRAEDTAVYYCARKGEGAMDYWGQGTTVTVSSASTKGPSVFPLAPSSKSTSGGTAALGCLVKDYFPEPVTVSWNSGALTSGVHTFPAVLQSSGLYSLSSVVTVPSSSLGTQTYICNVNHKPSNTKVDKKVEPKSC

SEQ ID NO: 1736 - protein, 220 aa, synthetic construct
EVQLVESGGGLVQPGGSLRLSCAASGFTFSNFGMHWVRQAPGKGLEWVSYISSGSSTIYYADTLKGRFTISRDNSKNTLYLQMNSLRAEDTAVYYCARLGEGAMDYWGQGTTVTVSSASTKGPSVFPLAPSSKSTSGGTAALGCLVKDYFPEPVTVSWNSGALTSGVHTFPAVLQSSGLYSLSSVVTVPSSSLGTQTYICNVNHKPSNTKVDKKVEPKSC

SEQ ID NO: 1737 - protein, 220 aa, synthetic construct
EVQLVESGGGLVQPGGSLRLSCAASGFTFSNFGMHWVRQAPGKGLEWVSYISSGSSTIYYADTLKGRFTISRDNSKNTLYLQMNSLRAEDTAVYYCARMGEGAMDYWGQGTTVTVSSASTKGPSVFPLAPSSKSTSGGTAALGCLVKDYFPEPVTVSWNSGALTSGVHTFPAVLQSSGLYSLSSVVTVPSSSLGTQTYICNVNHKPSNTKVDKKVEPKSC

SEQ ID NO: 1738 - protein, 220 aa, synthetic construct
EVQLVESGGGLVQPGGSLRLSCAASGFTFSNFGMHWVRQAPGKGLEWVSYISSGSSTIYYADTLKGRFTISRDNSKNTLYLQMNSLRAEDTAVYYCARNGEGAMDYWGQGTTVTVSSASTKGPSVFPLAPSSKSTSGGTAALGCLVKDYFPEPVTVSWNSGALTSGVHTFPAVLQSSGLYSLSSVVTVPSSSLGTQTYICNVNHKPSNTKVDKKVEPKSC

SEQ ID NO: 1739 - protein, 220 aa, synthetic construct
EVQLVESGGGLVQPGGSLRLSCAASGFTFSNFGMHWVRQAPGKGLEWVSYISSGSSTIYYADTLKGRFTISRDNSKNTLYLQMNSLRAEDTAVYYCARPGEGAMDYWGQGTTVTVSSASTKGPSVFPLAPSSKSTSGGTAALGCLVKDYFPEPVTVSWNSGALTSGVHTFPAVLQSSGLYSLSSVVTVPSSSLGTQTYICNVNHKPSNTKVDKKVEPKSC

SEQ ID NO: 1740 - protein, 220 aa, synthetic construct
EVQLVESGGGLVQPGGSLRLSCAASGFTFSNFGMHWVRQAPGKGLEWVSYISSGSSTIYYADTLKGRFTISRDNSKNTLYLQMNSLRAEDTAVYYCARQGEGAMDYWGQGTTVTVSSASTKGPSVFPLAPSSKSTSGGTAALGCLVKDYFPEPVTVSWNSGALTSGVHTFPAVLQSSGLYSLSSVVTVPSSSLGTQTYICNVNHKPSNTKVDKKVEPKSC

SEQ ID NO: 1741 - protein, 220 aa, synthetic construct
EVQLVESGGGLVQPGGSLRLSCAASGFTFSNFGMHWVRQAPGKGLEWVSYISSGSSTIYYADTLKGRFTISRDNSKNTLYLQMNSLRAEDTAVYYCARSGEGAMDYWGQGTTVTVSSASTKGPSVFPLAPSSKSTSGGTAALGCLVKDYFPEPVTVSWNSGALTSGVHTFPAVLQSSGLYSLSSVVTVPSSSLGTQTYICNVNHKPSNTKVDKKVEPKSC

SEQ ID NO: 1742 - protein, 220 aa, synthetic construct
EVQLVESGGGLVQPGGSLRLSCAASGFTFSNFGMHWVRQAPGKGLEWVSYISSGSSTIYYADTLKGRFTISRDNSKNTLYLQMNSLRAEDTAVYYCARTGEGAMDYWGQGTTVTVSSASTKGPSVFPLAPSSKSTSGGTAALGCLVKDYFPEPVTVSWNSGALTSGVHTFPAVLQSSGLYSLSSVVTVPSSSLGTQTYICNVNHKPSNTKVDKKVEPKSC

SEQ ID NO: 1743 - protein, 220 aa, synthetic construct
EVQLVESGGGLVQPGGSLRLSCAASGFTFSNFGMHWVRQAPGKGLEWVSYISSGSSTIYYADTLKGRFTISRDNSKNTLYLQMNSLRAEDTAVYYCARVGEGAMDYWGQGTTVTVSSASTKGPSVFPLAPSSKSTSGGTAALGCLVKDYFPEPVTVSWNSGALTSGVHTFPAVLQSSGLYSLSSVVTVPSSSLGTQTYICNVNHKPSNTKVDKKVEPKSC

SEQ ID NO: 1744 - protein, 220 aa, synthetic construct
EVQLVESGGGLVQPGGSLRLSCAASGFTFSNFGMHWVRQAPGKGLEWVSYISSGSSTIYYADTLKGRFTISRDNSKNTLYLQMNSLRAEDTAVYYCARWGEGAMDYWGQGTTVTVSSASTKGPSVFPLAPSSKSTSGGTAALGCLVKDYFPEPVTVSWNSGALTSGVHTFPAVLQSSGLYSLSSVVTVPSSSLGTQTYICNVNHKPSNTKVDKKVEPKSC

SEQ ID NO: 1745 - protein, 220 aa, synthetic construct
EVQLVESGGGLVQPGGSLRLSCAASGFTFSNFGMHWVRQAPGKGLEWVSYISSGSSTIYYADTLKGRFTISRDNSKNTLYLQMNSLRAEDTAVYYCARYGEGAMDYWGQGTTVTVSSASTKGPSVFPLAPSSKSTSGGTAALGCLVKDYFPEPVTVSWNSGALTSGVHTFPAVLQSSGLYSLSSVVTVPSSSLGTQTYICNVNHKPSNTKVDKKVEPKSC

SEQ ID NO: 1746 - protein, 220 aa, synthetic construct
EVQLVESGGGLVQPGGSLRLSCAASGFTFSNFGMHWVRQAPGKGLEWVSYISSGSSTIYYADTLKGRFTISRDNSKNTLYLQMNSLRAEDTAVYYCARRDEGAMDYWGQGTTVTVSSASTKGPSVFPLAPSSKSTSGGTAALGCLVKDYFPEPVTVSWNSGALTSGVHTFPAVLQSSGLYSLSSVVTVPSSSLGTQTYICNVNHKPSNTKVDKKVEPKSC

SEQ ID NO: 1747 - protein, 220 aa, synthetic construct
EVQLVESGGGLVQPGGSLRLSCAASGFTFSNFGMHWVRQAPGKGLEWVSYISSGSSTIYYADTLKGRFTISRDNSKNTLYLQMNSLRAEDTAVYYCARREEGAMDYWGQGTTVTVSSASTKGPSVFPLAPSSKSTSGGTAALGCLVKDYFPEPVTVSWNSGALTSGVHTFPAVLQSSGLYSLSSVVTVPSSSLGTQTYICNVNHKPSNTKVDKKVEPKSC

SEQ ID NO: 1748 - protein, 220 aa, synthetic construct
EVQLVESGGGLVQPGGSLRLSCAASGFTFSNFGMHWVRQAPGKGLEWVSYISSGSSTIYYADTLKGRFTISRDNSKNTLYLQMNSLRAEDTAVYYCARRFEGAMDYWGQGTTVTVSSASTKGPSVFPLAPSSKSTSGGTAALGCLVKDYFPEPVTVSWNSGALTSGVHTFPAVLQSSGLYSLSSVVTVPSSSLGTQTYICNVNHKPSNTKVDKKVEPKSC

SEQ ID NO: 1749 - protein, 220 aa, synthetic construct
EVQLVESGGGLVQPGGSLRLSCAASGFTFSNFGMHWVRQAPGKGLEWVSYISSGSSTIYYADTLKGRFTISRDNSKNTLYLQMNSLRAEDTAVYYCARRHEGAMDYWGQGTTVTVSSASTKGPSVFPLAPSSKSTSGGTAALGCLVKDYFPEPVTVSWNSGALTSGVHTFPAVLQSSGLYSLSSVVTVPSSSLGTQTYICNVNHKPSNTKVDKKVEPKSC

SEQ ID NO: 1750 - protein, 220 aa, synthetic construct
EVQLVESGGGLVQPGGSLRLSCAASGFTFSNFGMHWVRQAPGKGLEWVSYISSGSSTIYYADTLKGRFTISRDNSKNTLYLQMNSLRAEDTAVYYCARRIEGAMDYWGQGTTVTVSSASTKGPSVFPLAPSSKSTSGGTAALGCLVKDYFPEPVTVSWNSGALTSGVHTFPAVLQSSGLYSLSSVVTVPSSSLGTQTYICNVNHKPSNTKVDKKVEPKSC

SEQ ID NO: 1751 - protein, 220 aa, synthetic construct
EVQLVESGGGLVQPGGSLRLSCAASGFTFSNFGMHWVRQAPGKGLEWVSYISSGSSTIYYADTLKGRFTISRDNSKNTLYLQMNSLRAEDTAVYYCARRKEGAMDYWGQGTTVTVSSASTKGPSVFPLAPSSKSTSGGTAALGCLVKDYFPEPVTVSWNSGALTSGVHTFPAVLQSSGLYSLSSVVTVPSSSLGTQTYICNVNHKPSNTKVDKKVEPKSC

SEQ ID NO: 1752 - protein, 220 aa, synthetic construct
EVQLVESGGGLVQPGGSLRLSCAASGFTFSNFGMHWVRQAPGKGLEWVSYISSGSSTIYYADTLKGRFTISRDNSKNTLYLQMNSLRAEDTAVYYCARRLEGAMDYWGQGTTVTVSSASTKGPSVFPLAPSSKSTSGGTAALGCLVKDYFPEPVTVSWNSGALTSGVHTFPAVLQSSGLYSLSSVVTVPSSSLGTQTYICNVNHKPSNTKVDKKVEPKSC

SEQ ID NO: 1753 - protein, 220 aa, synthetic construct
EVQLVESGGGLVQPGGSLRLSCAASGFTFSNFGMHWVRQAPGKGLEWVSYISSGSSTIYYADTLKGRFTISRDNSKNTLYLQMNSLRAEDTAVYYCARRMEGAMDYWGQGTTVTVSSASTKGPSVFPLAPSSKSTSGGTAALGCLVKDYFPEPVTVSWNSGALTSGVHTFPAVLQSSGLYSLSSVVTVPSSSLGTQTYICNVNHKPSNTKVDKKVEPKSC

SEQ ID NO: 1754 - protein, 220 aa, synthetic construct
EVQLVESGGGLVQPGGSLRLSCAASGFTFSNFGMHWVRQAPGKGLEWVSYISSGSSTIYYADTLKGRFTISRDNSKNTLYLQMNSLRAEDTAVYYCARRNEGAMDYWGQGTTVTVSSASTKGPSVFPLAPSSKSTSGGTAALGCLVKDYFPEPVTVSWNSGALTSGVHTFPAVLQSSGLYSLSSVVTVPSSSLGTQTYICNVNHKPSNTKVDKKVEPKSC

SEQ ID NO: 1755 - protein, 220 aa, synthetic construct
EVQLVESGGGLVQPGGSLRLSCAASGFTFSNFGMHWVRQAPGKGLEWVSYISSGSSTIYYADTLKGRFTISRDNSKNTLYLQMNSLRAEDTAVYYCARRPEGAMDYWGQGTTVTVSSASTKGPSVFPLAPSSKSTSGGTAALGCLVKDYFPEPVTVSWNSGALTSGVHTFPAVLQSSGLYSLSSVVTVPSSSLGTQTYICNVNHKPSNTKVDKKVEPKSC

SEQ ID NO: 1756 - protein, 220 aa, synthetic construct
EVQLVESGGGLVQPGGSLRLSCAASGFTFSNFGMHWVRQAPGKGLEWVSYISSGSSTIYYADTLKGRFTISRDNSKNTLYLQMNSLRAEDTAVYYCARRREGAMDYWGQGTTVTVSSASTKGPSVFPLAPSSKSTSGGTAALGCLVKDYFPEPVTVSWNSGALTSGVHTFPAVLQSSGLYSLSSVVTVPSSSLGTQTYICNVNHKPSNTKVDKKVEPKSC

SEQ ID NO: 1757 - protein, 220 aa, synthetic construct
EVQLVESGGGLVQPGGSLRLSCAASGFTFSNFGMHWVRQAPGKGLEWVSYISSGSSTIYYADTLKGRFTISRDNSKNTLYLQMNSLRAEDTAVYYCARRSEGAMDYWGQGTTVTVSSASTKGPSVFPLAPSSKSTSGGTAALGCLVKDYFPEPVTVSWNSGALTSGVHTFPAVLQSSGLYSLSSVVTVPSSSLGTQTYICNVNHKPSNTKVDKKVEPKSC

SEQ ID NO: 1758 - protein, 220 aa, synthetic construct
EVQLVESGGGLVQPGGSLRLSCAASGFTFSNFGMHWVRQAPGKGLEWVSYISSGSSTIYYADTLKGRFTISRDNSKNTLYLQMNSLRAEDTAVYYCARRTEGAMDYWGQGTTVTVSSASTKGPSVFPLAPSSKSTSGGTAALGCLVKDYFPEPVTVSWNSGALTSGVHTFPAVLQSSGLYSLSSVVTVPSSSLGTQTYICNVNHKPSNTKVDKKVEPKSC

SEQ ID NO: 1759 - protein, 220 aa, synthetic construct
EVQLVESGGGLVQPGGSLRLSCAASGFTFSNFGMHWVRQAPGKGLEWVSYISSGSSTIYYADTLKGRFTISRDNSKNTLYLQMNSLRAEDTAVYYCARRVEGAMDYWGQGTTVTVSSASTKGPSVFPLAPSSKSTSGGTAALGCLVKDYFPEPVTVSWNSGALTSGVHTFPAVLQSSGLYSLSSVVTVPSSSLGTQTYICNVNHKPSNTKVDKKVEPKSC

SEQ ID NO: 1760 - protein, 220 aa, synthetic construct
EVQLVESGGGLVQPGGSLRLSCAASGFTFSNFGMHWVRQAPGKGLEWVSYISSGSSTIYYADTLKGRFTISRDNSKNTLYLQMNSLRAEDTAVYYCARRWEGAMDYWGQGTTVTVSSASTKGPSVFPLAPSSKSTSGGTAALGCLVKDYFPEPVTVSWNSGALTSGVHTFPAVLQSSGLYSLSSVVTVPSSSLGTQTYICNVNHKPSNTKVDKKVEPKSC

SEQ ID NO: 1761 - protein, 220 aa, synthetic construct
EVQLVESGGGLVQPGGSLRLSCAASGFTFSNFGMHWVRQAPGKGLEWVSYISSGSSTIYYADTLKGRFTISRDNSKNTLYLQMNSLRAEDTAVYYCARRYEGAMDYWGQGTTVTVSSASTKGPSVFPLAPSSKSTSGGTAALGCLVKDYFPEPVTVSWNSGALTSGVHTFPAVLQSSGLYSLSSVVTVPSSSLGTQTYICNVNHKPSNTKVDKKVEPKSC

SEQ ID NO: 1762 - protein, 220 aa, synthetic construct
EVQLVESGGGLVQPGGSLRLSCAASGFTFSNFGMHWVRQAPGKGLEWVSYISSGSSTIYYADTLKGRFTISRDNSKNTLYLQMNSLRAEDTAVYYCARRGDGAMDYWGQGTTVTVSSASTKGPSVFPLAPSSKSTSGGTAALGCLVKDYFPEPVTVSWNSGALTSGVHTFPAVLQSSGLYSLSSVVTVPSSSLGTQTYICNVNHKPSNTKVDKKVEPKSC

SEQ ID NO: 1763 - protein, 220 aa, synthetic construct
EVQLVESGGGLVQPGGSLRLSCAASGFTFSNFGMHWVRQAPGKGLEWVSYISSGSSTIYYADTLKGRFTISRDNSKNTLYLQMNSLRAEDTAVYYCARRGGGAMDYWGQGTTVTVSSASTKGPSVFPLAPSSKSTSGGTAALGCLVKDYFPEPVTVSWNSGALTSGVHTFPAVLQSSGLYSLSSVVTVPSSSLGTQTYICNVNHKPSNTKVDKKVEPKSC

SEQ ID NO: 1764 - protein, 220 aa, synthetic construct
EVQLVESGGGLVQPGGSLRLSCAASGFTFSNFGMHWVRQAPGKGLEWVSYISSGSSTIYYADTLKGRFTISRDNSKNTLYLQMNSLRAEDTAVYYCARRGIGAMDYWGQGTTVTVSSASTKGPSVFPLAPSSKSTSGGTAALGCLVKDYFPEPVTVSWNSGALTSGVHTFPAVLQSSGLYSLSSVVTVPSSSLGTQTYICNVNHKPSNTKVDKKVEPKSC

SEQ ID NO: 1765 - protein, 220 aa, synthetic construct
EVQLVESGGGLVQPGGSLRLSCAASGFTFSNFGMHWVRQAPGKGLEWVSYISSGSSTIYYADTLKGRFTISRDNSKNTLYLQMNSLRAEDTAVYYCARRGKGAMDYWGQGTTVTVSSASTKGPSVFPLAPSSKSTSGGTAALGCLVKDYFPEPVTVSWNSGALTSGVHTFPAVLQSSGLYSLSSVVTVPSSSLGTQTYICNVNHKPSNTKVDKKVEPKSC

SEQ ID NO: 1766 - protein, 220 aa, synthetic construct
EVQLVESGGGLVQPGGSLRLSCAASGFTFSNFGMHWVRQAPGKGLEWVSYISSGSSTIYYADTLKGRFTISRDNSKNTLYLQMNSLRAEDTAVYYCARRGMGAMDYWGQGTTVTVSSASTKGPSVFPLAPSSKSTSGGTAALGCLVKDYFPEPVTVSWNSGALTSGVHTFPAVLQSSGLYSLSSVVTVPSSSLGTQTYICNVNHKPSNTKVDKKVEPKSC

SEQ ID NO: 1767 - protein, 220 aa, synthetic construct
EVQLVESGGGLVQPGGSLRLSCAASGFTFSNFGMHWVRQAPGKGLEWVSYISSGSSTIYYADTLKGRFTISRDNSKNTLYLQMNSLRAEDTAVYYCARRGNGAMDYWGQGTTVTVSSASTKGPSVFPLAPSSKSTSGGTAALGCLVKDYFPEPVTVSWNSGALTSGVHTFPAVLQSSGLYSLSSVVTVPSSSLGTQTYICNVNHKPSNTKVDKKVEPKSC

SEQ ID NO: 1768 - protein, 220 aa, synthetic construct
EVQLVESGGGLVQPGGSLRLSCAASGFTFSNFGMHWVRQAPGKGLEWVSYISSGSSTIYYADTLKGRFTISRDNSKNTLYLQMNSLRAEDTAVYYCARRGPGAMDYWGQGTTVTVSSASTKGPSVFPLAPSSKSTSGGTAALGCLVKDYFPEPVTVSWNSGALTSGVHTFPAVLQSSGLYSLSSVVTVPSSSLGTQTYICNVNHKPSNTKVDKKVEPKSC

SEQ ID NO: 1769 - protein, 220 aa, synthetic construct
EVQLVESGGGLVQPGGSLRLSCAASGFTFSNFGMHWVRQAPGKGLEWVSYISSGSSTIYYADTLKGRFTISRDNSKNTLYLQMNSLRAEDTAVYYCARRGRGAMDYWGQGTTVTVSSASTKGPSVFPLAPSSKSTSGGTAALGCLVKDYFPEPVTVSWNSGALTSGVHTFPAVLQSSGLYSLSSVVTVPSSSLGTQTYICNVNHKPSNTKVDKKVEPKSC

SEQ ID NO: 1770 - protein, 220 aa, synthetic construct
EVQLVESGGGLVQPGGSLRLSCAASGFTFSNFGMHWVRQAPGKGLEWVSYISSGSSTIYYADTLKGRFTISRDNSKNTLYLQMNSLRAEDTAVYYCARRGSGAMDYWGQGTTVTVSSASTKGPSVFPLAPSSKSTSGGTAALGCLVKDYFPEPVTVSWNSGALTSGVHTFPAVLQSSGLYSLSSVVTVPSSSLGTQTYICNVNHKPSNTKVDKKVEPKSC

SEQ ID NO: 1771 - protein, 220 aa, synthetic construct
EVQLVESGGGLVQPGGSLRLSCAASGFTFSNFGMHWVRQAPGKGLEWVSYISSGSSTIYYADTLKGRFTISRDNSKNTLYLQMNSLRAEDTAVYYCARRGVGAMDYWGQGTTVTVSSASTKGPSVFPLAPSSKSTSGGTAALGCLVKDYFPEPVTVSWNSGALTSGVHTFPAVLQSSGLYSLSSVVTVPSSSLGTQTYICNVNHKPSNTKVDKKVEPKSC

SEQ ID NO: 1772 - protein, 220 aa, synthetic construct
EVQLVESGGGLVQPGGSLRLSCAASGFTFSNFGMHWVRQAPGKGLEWVSYISSGSSTIYYADTLKGRFTISRDNSKNTLYLQMNSLRAEDTAVYYCARRGWGAMDYWGQGTTVTVSSASTKGPSVFPLAPSSKSTSGGTAALGCLVKDYFPEPVTVSWNSGALTSGVHTFPAVLQSSGLYSLSSVVTVPSSSLGTQTYICNVNHKPSNTKVDKKVEPKSC

SEQ ID NO: 1773 - protein, 220 aa, synthetic construct
EVQLVESGGGLVQPGGSLRLSCAASGFTFSNFGMHWVRQAPGKGLEWVSYISSGSSTIYYADTLKGRFTISRDNSKNTLYLQMNSLRAEDTAVYYCARRGYGAMDYWGQGTTVTVSSASTKGPSVFPLAPSSKSTSGGTAALGCLVKDYFPEPVTVSWNSGALTSGVHTFPAVLQSSGLYSLSSVVTVPSSSLGTQTYICNVNHKPSNTKVDKKVEPKSC

SEQ ID NO: 1774 - protein, 220 aa, synthetic construct
EVQLVESGGGLVQPGGSLRLSCAASGFTFSNFGMHWVRQAPGKGLEWVSYISSGSSTIYYADTLKGRFTISRDNSKNTLYLQMNSLRAEDTAVYYCARRGEAAMDYWGQGTTVTVSSASTKGPSVFPLAPSSKSTSGGTAALGCLVKDYFPEPVTVSWNSGALTSGVHTFPAVLQSSGLYSLSSVVTVPSSSLGTQTYICNVNHKPSNTKVDKKVEPKSC

SEQ ID NO: 1775 - protein, 220 aa, synthetic construct
EVQLVESGGGLVQPGGSLRLSCAASGFTFSNFGMHWVRQAPGKGLEWVSYISSGSSTIYYADTLKGRFTISRDNSKNTLYLQMNSLRAEDTAVYYCARRGEDAMDYWGQGTTVTVSSASTKGPSVFPLAPSSKSTSGGTAALGCLVKDYFPEPVTVSWNSGALTSGVHTFPAVLQSSGLYSLSSVVTVPSSSLGTQTYICNVNHKPSNTKVDKKVEPKSC

SEQ ID NO: 1776 - protein, 220 aa, synthetic construct
EVQLVESGGGLVQPGGSLRLSCAASGFTFSNFGMHWVRQAPGKGLEWVSYISSGSSTIYYADTLKGRFTISRDNSKNTLYLQMNSLRAEDTAVYYCARRGEEAMDYWGQGTTVTVSSASTKGPSVFPLAPSSKSTSGGTAALGCLVKDYFPEPVTVSWNSGALTSGVHTFPAVLQSSGLYSLSSVVTVPSSSLGTQTYICNVNHKPSNTKVDKKVEPKSC

SEQ ID NO: 1777 - protein, 220 aa, synthetic construct
EVQLVESGGGLVQPGGSLRLSCAASGFTFSNFGMHWVRQAPGKGLEWVSYISSGSSTIYYADTLKGRFTISRDNSKNTLYLQMNSLRAEDTAVYYCARRGEFAMDYWGQGTTVTVSSASTKGPSVFPLAPSSKSTSGGTAALGCLVKDYFPEPVTVSWNSGALTSGVHTFPAVLQSSGLYSLSSVVTVPSSSLGTQTYICNVNHKPSNTKVDKKVEPKSC

SEQ ID NO: 1778 - protein, 220 aa, synthetic construct
EVQLVESGGGLVQPGGSLRLSCAASGFTFSNFGMHWVRQAPGKGLEWVSYISSGSSTIYYADTLKGRFTISRDNSKNTLYLQMNSLRAEDTAVYYCARRGEHAMDYWGQGTTVTVSSASTKGPSVFPLAPSSKSTSGGTAALGCLVKDYFPEPVTVSWNSGALTSGVHTFPAVLQSSGLYSLSSVVTVPSSSLGTQTYICNVNHKPSNTKVDKKVEPKSC

SEQ ID NO: 1779 - protein, 220 aa, synthetic construct
EVQLVESGGGLVQPGGSLRLSCAASGFTFSNFGMHWVRQAPGKGLEWVSYISSGSSTIYYADTLKGRFTISRDNSKNTLYLQMNSLRAEDTAVYYCARRGEIAMDYWGQGTTVTVSSASTKGPSVFPLAPSSKSTSGGTAALGCLVKDYFPEPVTVSWNSGALTSGVHTFPAVLQSSGLYSLSSVVTVPSSSLGTQTYICNVNHKPSNTKVDKKVEPKSC

SEQ ID NO: 1780 - protein, 220 aa, synthetic construct
EVQLVESGGGLVQPGGSLRLSCAASGFTFSNFGMHWVRQAPGKGLEWVSYISSGSSTIYYADTLKGRFTISRDNSKNTLYLQMNSLRAEDTAVYYCARRGEKAMDYWGQGTTVTVSSASTKGPSVFPLAPSSKSTSGGTAALGCLVKDYFPEPVTVSWNSGALTSGVHTFPAVLQSSGLYSLSSVVTVPSSSLGTQTYICNVNHKPSNTKVDKKVEPKSC

SEQ ID NO: 1781 - protein, 220 aa, synthetic construct
EVQLVESGGGLVQPGGSLRLSCAASGFTFSNFGMHWVRQAPGKGLEWVSYISSGSSTIYYADTLKGRFTISRDNSKNTLYLQMNSLRAEDTAVYYCARRGELAMDYWGQGTTVTVSSASTKGPSVFPLAPSSKSTSGGTAALGCLVKDYFPEPVTVSWNSGALTSGVHTFPAVLQSSGLYSLSSVVTVPSSSLGTQTYICNVNHKPSNTKVDKKVEPKSC

SEQ ID NO: 1782 - protein, 220 aa, synthetic construct
EVQLVESGGGLVQPGGSLRLSCAASGFTFSNFGMHWVRQAPGKGLEWVSYISSGSSTIYYADTLKGRFTISRDNSKNTLYLQMNSLRAEDTAVYYCARRGEMAMDYWGQGTTVTVSSASTKGPSVFPLAPSSKSTSGGTAALGCLVKDYFPEPVTVSWNSGALTSGVHTFPAVLQSSGLYSLSSVVTVPSSSLGTQTYICNVNHKPSNTKVDKKVEPKSC

SEQ ID NO: 1783 - protein, 220 aa, synthetic construct
EVQLVESGGGLVQPGGSLRLSCAASGFTFSNFGMHWVRQAPGKGLEWVSYISSGSSTIYYADTLKGRFTISRDNSKNTLYLQMNSLRAEDTAVYYCARRGENAMDYWGQGTTVTVSSASTKGPSVFPLAPSSKSTSGGTAALGCLVKDYFPEPVTVSWNSGALTSGVHTFPAVLQSSGLYSLSSVVTVPSSSLGTQTYICNVNHKPSNTKVDKKVEPKSC

SEQ ID NO: 1784 - protein, 220 aa, synthetic construct
EVQLVESGGGLVQPGGSLRLSCAASGFTFSNFGMHWVRQAPGKGLEWVSYISSGSSTIYYADTLKGRFTISRDNSKNTLYLQMNSLRAEDTAVYYCARRGEPAMDYWGQGTTVTVSSASTKGPSVFPLAPSSKSTSGGTAALGCLVKDYFPEPVTVSWNSGALTSGVHTFPAVLQSSGLYSLSSVVTVPSSSLGTQTYICNVNHKPSNTKVDKKVEPKSC

SEQ ID NO: 1785 - protein, 220 aa, synthetic construct
EVQLVESGGGLVQPGGSLRLSCAASGFTFSNFGMHWVRQAPGKGLEWVSYISSGSSTIYYADTLKGRFTISRDNSKNTLYLQMNSLRAEDTAVYYCARRGERAMDYWGQGTTVTVSSASTKGPSVFPLAPSSKSTSGGTAALGCLVKDYFPEPVTVSWNSGALTSGVHTFPAVLQSSGLYSLSSVVTVPSSSLGTQTYICNVNHKPSNTKVDKKVEPKSC

SEQ ID NO: 1786 - protein, 220 aa, synthetic construct
EVQLVESGGGLVQPGGSLRLSCAASGFTFSNFGMHWVRQAPGKGLEWVSYISSGSSTIYYADTLKGRFTISRDNSKNTLYLQMNSLRAEDTAVYYCARRGESAMDYWGQGTTVTVSSASTKGPSVFPLAPSSKSTSGGTAALGCLVKDYFPEPVTVSWNSGALTSGVHTFPAVLQSSGLYSLSSVVTVPSSSLGTQTYICNVNHKPSNTKVDKKVEPKSC

SEQ ID NO: 1787 - protein, 220 aa, synthetic construct
EVQLVESGGGLVQPGGSLRLSCAASGFTFSNFGMHWVRQAPGKGLEWVSYISSGSSTIYYADTLKGRFTISRDNSKNTLYLQMNSLRAEDTAVYYCARRGETAMDYWGQGTTVTVSSASTKGPSVFPLAPSSKSTSGGTAALGCLVKDYFPEPVTVSWNSGALTSGVHTFPAVLQSSGLYSLSSVVTVPSSSLGTQTYICNVNHKPSNTKVDKKVEPKSC

SEQ ID NO: 1788 - protein, 220 aa, synthetic construct
EVQLVESGGGLVQPGGSLRLSCAASGFTFSNFGMHWVRQAPGKGLEWVSYISSGSSTIYYADTLKGRFTISRDNSKNTLYLQMNSLRAEDTAVYYCARRGEVAMDYWGQGTTVTVSSASTKGPSVFPLAPSSKSTSGGTAALGCLVKDYFPEPVTVSWNSGALTSGVHTFPAVLQSSGLYSLSSVVTVPSSSLGTQTYICNVNHKPSNTKVDKKVEPKSC

SEQ ID NO: 1789 - protein, 220 aa, synthetic construct
EVQLVESGGGLVQPGGSLRLSCAASGFTFSNFGMHWVRQAPGKGLEWVSYISSGSSTIYYADTLKGRFTISRDNSKNTLYLQMNSLRAEDTAVYYCARRGEWAMDYWGQGTTVTVSSASTKGPSVFPLAPSSKSTSGGTAALGCLVKDYFPEPVTVSWNSGALTSGVHTFPAVLQSSGLYSLSSVVTVPSSSLGTQTYICNVNHKPSNTKVDKKVEPKSC

SEQ ID NO: 1790 - protein, 220 aa, synthetic construct
EVQLVESGGGLVQPGGSLRLSCAASGFTFSNFGMHWVRQAPGKGLEWVSYISSGSSTIYYADTLKGRFTISRDNSKNTLYLQMNSLRAEDTAVYYCARRGEYAMDYWGQGTTVTVSSASTKGPSVFPLAPSSKSTSGGTAALGCLVKDYFPEPVTVSWNSGALTSGVHTFPAVLQSSGLYSLSSVVTVPSSSLGTQTYICNVNHKPSNTKVDKKVEPKSC

SEQ ID NO: 1791 - protein, 220 aa, synthetic construct
EVQLVESGGGLVQPGGSLRLSCAASGFTFSNFGMHWVRQAPGKGLEWVSYISSGSSTIYYADTLKGRFTISRDNSKNTLYLQMNSLRAEDTAVYYCARRGEGDMDYWGQGTTVTVSSASTKGPSVFPLAPSSKSTSGGTAALGCLVKDYFPEPVTVSWNSGALTSGVHTFPAVLQSSGLYSLSSVVTVPSSSLGTQTYICNVNHKPSNTKVDKKVEPKSC

SEQ ID NO: 1792 - protein, 220 aa, synthetic construct
EVQLVESGGGLVQPGGSLRLSCAASGFTFSNFGMHWVRQAPGKGLEWVSYISSGSSTIYYADTLKGRFTISRDNSKNTLYLQMNSLRAEDTAVYYCARRGEGEMDYWGQGTTVTVSSASTKGPSVFPLAPSSKSTSGGTAALGCLVKDYFPEPVTVSWNSGALTSGVHTFPAVLQSSGLYSLSSVVTVPSSSLGTQTYICNVNHKPSNTKVDKKVEPKSC

SEQ ID NO: 1793 - protein, 220 aa, synthetic construct
EVQLVESGGGLVQPGGSLRLSCAASGFTFSNFGMHWVRQAPGKGLEWVSYISSGSSTIYYADTLKGRFTISRDNSKNTLYLQMNSLRAEDTAVYYCARRGEGFMDYWGQGTTVTVSSASTKGPSVFPLAPSSKSTSGGTAALGCLVKDYFPEPVTVSWNSGALTSGVHTFPAVLQSSGLYSLSSVVTVPSSSLGTQTYICNVNHKPSNTKVDKKVEPKSC

SEQ ID NO: 1794 - protein, 220 aa, synthetic construct
EVQLVESGGGLVQPGGSLRLSCAASGFTFSNFGMHWVRQAPGKGLEWVSYISSGSSTIYYADTLKGRFTISRDNSKNTLYLQMNSLRAEDTAVYYCARRGEGGMDYWGQGTTVTVSSASTKGPSVFPLAPSSKSTSGGTAALGCLVKDYFPEPVTVSWNSGALTSGVHTFPAVLQSSGLYSLSSVVTVPSSSLGTQTYICNVNHKPSNTKVDKKVEPKSC

SEQ ID NO: 1795 - protein, 220 aa, synthetic construct
EVQLVESGGGLVQPGGSLRLSCAASGFTFSNFGMHWVRQAPGKGLEWVSYISSGSSTIYYADTLKGRFTISRDNSKNTLYLQMNSLRAEDTAVYYCARRGEGHMDYWGQGTTVTVSSASTKGPSVFPLAPSSKSTSGGTAALGCLVKDYFPEPVTVSWNSGALTSGVHTFPAVLQSSGLYSLSSVVTVPSSSLGTQTYICNVNHKPSNTKVDKKVEPKSC

SEQ ID NO: 1796 - protein, 220 aa, synthetic construct
EVQLVESGGGLVQPGGSLRLSCAASGFTFSNFGMHWVRQAPGKGLEWVSYISSGSSTIYYADTLKGRFTISRDNSKNTLYLQMNSLRAEDTAVYYCARRGEGIMDYWGQGTTVTVSSASTKGPSVFPLAPSSKSTSGGTAALGCLVKDYFPEPVTVSWNSGALTSGVHTFPAVLQSSGLYSLSSVVTVPSSSLGTQTYICNVNHKPSNTKVDKKVEPKSC

SEQ ID NO: 1797 - protein, 220 aa, synthetic construct
EVQLVESGGGLVQPGGSLRLSCAASGFTFSNFGMHWVRQAPGKGLEWVSYISSGSSTIYYADTLKGRFTISRDNSKNTLYLQMNSLRAEDTAVYYCARRGEGKMDYWGQGTTVTVSSASTKGPSVFPLAPSSKSTSGGTAALGCLVKDYFPEPVTVSWNSGALTSGVHTFPAVLQSSGLYSLSSVVTVPSSSLGTQTYICNVNHKPSNTKVDKKVEPKSC

SEQ ID NO: 1798 - protein, 220 aa, synthetic construct
EVQLVESGGGLVQPGGSLRLSCAASGFTFSNFGMHWVRQAPGKGLEWVSYISSGSSTIYYADTLKGRFTISRDNSKNTLYLQMNSLRAEDTAVYYCARRGEGLMDYWGQGTTVTVSSASTKGPSVFPLAPSSKSTSGGTAALGCLVKDYFPEPVTVSWNSGALTSGVHTFPAVLQSSGLYSLSSVVTVPSSSLGTQTYICNVNHKPSNTKVDKKVEPKSC

SEQ ID NO: 1799 - protein, 220 aa, synthetic construct
EVQLVESGGGLVQPGGSLRLSCAASGFTFSNFGMHWVRQAPGKGLEWVSYISSGSSTIYYADTLKGRFTISRDNSKNTLYLQMNSLRAEDTAVYYCARRGEGMMDYWGQGTTVTVSSASTKGPSVFPLAPSSKSTSGGTAALGCLVKDYFPEPVTVSWNSGALTSGVHTFPAVLQSSGLYSLSSVVTVPSSSLGTQTYICNVNHKPSNTKVDKKVEPKSC

SEQ ID NO: 1800 - protein, 220 aa, synthetic construct
EVQLVESGGGLVQPGGSLRLSCAASGFTFSNFGMHWVRQAPGKGLEWVSYISSGSSTIYYADTLKGRFTISRDNSKNTLYLQMNSLRAEDTAVYYCARRGEGNMDYWGQGTTVTVSSASTKGPSVFPLAPSSKSTSGGTAALGCLVKDYFPEPVTVSWNSGALTSGVHTFPAVLQSSGLYSLSSVVTVPSSSLGTQTYICNVNHKPSNTKVDKKVEPKSC

SEQ ID NO: 1801 - protein, 220 aa, synthetic construct
EVQLVESGGGLVQPGGSLRLSCAASGFTFSNFGMHWVRQAPGKGLEWVSYISSGSSTIYYADTLKGRFTISRDNSKNTLYLQMNSLRAEDTAVYYCARRGEGPMDYWGQGTTVTVSSASTKGPSVFPLAPSSKSTSGGTAALGCLVKDYFPEPVTVSWNSGALTSGVHTFPAVLQSSGLYSLSSVVTVPSSSLGTQTYICNVNHKPSNTKVDKKVEPKSC

SEQ ID NO: 1802 - protein, 220 aa, synthetic construct
EVQLVESGGGLVQPGGSLRLSCAASGFTFSNFGMHWVRQAPGKGLEWVSYISSGSSTIYYADTLKGRFTISRDNSKNTLYLQMNSLRAEDTAVYYCARRGEGQMDYWGQGTTVTVSSASTKGPSVFPLAPSSKSTSGGTAALGCLVKDYFPEPVTVSWNSGALTSGVHTFPAVLQSSGLYSLSSVVTVPSSSLGTQTYICNVNHKPSNTKVDKKVEPKSC

SEQ ID NO: 1803 - protein, 220 aa, synthetic construct
EVQLVESGGGLVQPGGSLRLSCAASGFTFSNFGMHWVRQAPGKGLEWVSYISSGSSTIYYADTLKGRFTISRDNSKNTLYLQMNSLRAEDTAVYYCARRGEGRMDYWGQGTTVTVSSASTKGPSVFPLAPSSKSTSGGTAALGCLVKDYFPEPVTVSWNSGALTSGVHTFPAVLQSSGLYSLSSVVTVPSSSLGTQTYICNVNHKPSNTKVDKKVEPKSC

SEQ ID NO: 1804 - protein, 220 aa, synthetic construct
EVQLVESGGGLVQPGGSLRLSCAASGFTFSNFGMHWVRQAPGKGLEWVSYISSGSSTIYYADTLKGRFTISRDNSKNTLYLQMNSLRAEDTAVYYCARRGEGSMDYWGQGTTVTVSSASTKGPSVFPLAPSSKSTSGGTAALGCLVKDYFPEPVTVSWNSGALTSGVHTFPAVLQSSGLYSLSSVVTVPSSSLGTQTYICNVNHKPSNTKVDKKVEPKSC

SEQ ID NO: 1805 - protein, 220 aa, synthetic construct
EVQLVESGGGLVQPGGSLRLSCAASGFTFSNFGMHWVRQAPGKGLEWVSYISSGSSTIYYADTLKGRFTISRDNSKNTLYLQMNSLRAEDTAVYYCARRGEGTMDYWGQGTTVTVSSASTKGPSVFPLAPSSKSTSGGTAALGCLVKDYFPEPVTVSWNSGALTSGVHTFPAVLQSSGLYSLSSVVTVPSSSLGTQTYICNVNHKPSNTKVDKKVEPKSC

SEQ ID NO: 1806 - protein, 220 aa, synthetic construct
EVQLVESGGGLVQPGGSLRLSCAASGFTFSNFGMHWVRQAPGKGLEWVSYISSGSSTIYYADTLKGRFTISRDNSKNTLYLQMNSLRAEDTAVYYCARRGEGVMDYWGQGTTVTVSSASTKGPSVFPLAPSSKSTSGGTAALGCLVKDYFPEPVTVSWNSGALTSGVHTFPAVLQSSGLYSLSSVVTVPSSSLGTQTYICNVNHKPSNTKVDKKVEPKSC

SEQ ID NO: 1807 - protein, 220 aa, synthetic construct
EVQLVESGGGLVQPGGSLRLSCAASGFTFSNFGMHWVRQAPGKGLEWVSYISSGSSTIYYADTLKGRFTISRDNSKNTLYLQMNSLRAEDTAVYYCARRGEGWMDYWGQGTTVTVSSASTKGPSVFPLAPSSKSTSGGTAALGCLVKDYFPEPVTVSWNSGALTSGVHTFPAVLQSSGLYSLSSVVTVPSSSLGTQTYICNVNHKPSNTKVDKKVEPKSC

SEQ ID NO: 1808 - protein, 220 aa, synthetic construct
EVQLVESGGGLVQPGGSLRLSCAASGFTFSNFGMHWVRQAPGKGLEWVSYISSGSSTIYYADTLKGRFTISRDNSKNTLYLQMNSLRAEDTAVYYCARRGEGYMDYWGQGTTVTVSSASTKGPSVFPLAPSSKSTSGGTAALGCLVKDYFPEPVTVSWNSGALTSGVHTFPAVLQSSGLYSLSSVVTVPSSSLGTQTYICNVNHKPSNTKVDKKVEPKSC

SEQ ID NO: 1809 - protein, 220 aa, synthetic construct
EVQLVESGGGLVQPGGSLRLSCAASGFTFSNFGMHWVRQAPGKGLEWVSYISSGSSTIYYADTLKGRFTISRDNSKNTLYLQMNSLRAEDTAVYYCARRGEGAADYWGQGTTVTVSSASTKGPSVFPLAPSSKSTSGGTAALGCLVKDYFPEPVTVSWNSGALTSGVHTFPAVLQSSGLYSLSSVVTVPSSSLGTQTYICNVNHKPSNTKVDKKVEPKSC

SEQ ID NO: 1810 - protein, 220 aa, synthetic construct
EVQLVESGGGLVQPGGSLRLSCAASGFTFSNFGMHWVRQAPGKGLEWVSYISSGSSTIYYADTLKGRFTISRDNSKNTLYLQMNSLRAEDTAVYYCARRGEGADDYWGQGTTVTVSSASTKGPSVFPLAPSSKSTSGGTAALGCLVKDYFPEPVTVSWNSGALTSGVHTFPAVLQSSGLYSLSSVVTVPSSSLGTQTYICNVNHKPSNTKVDKKVEPKSC

SEQ ID NO: 1811 - protein, 220 aa, synthetic construct
EVQLVESGGGLVQPGGSLRLSCAASGFTFSNFGMHWVRQAPGKGLEWVSYISSGSSTIYYADTLKGRFTISRDNSKNTLYLQMNSLRAEDTAVYYCARRGEGAEDYWGQGTTVTVSSASTKGPSVFPLAPSSKSTSGGTAALGCLVKDYFPEPVTVSWNSGALTSGVHTFPAVLQSSGLYSLSSVVTVPSSSLGTQTYICNVNHKPSNTKVDKKVEPKSC

SEQ ID NO: 1812 - protein, 220 aa, synthetic construct
EVQLVESGGGLVQPGGSLRLSCAASGFTFSNFGMHWVRQAPGKGLEWVSYISSGSSTIYYADTLKGRFTISRDNSKNTLYLQMNSLRAEDTAVYYCARRGEGAFDYWGQGTTVTVSSASTKGPSVFPLAPSSKSTSGGTAALGCLVKDYFPEPVTVSWNSGALTSGVHTFPAVLQSSGLYSLSSVVTVPSSSLGTQTYICNVNHKPSNTKVDKKVEPKSC

SEQ ID NO: 1813 - protein, 220 aa, synthetic construct
EVQLVESGGGLVQPGGSLRLSCAASGFTFSNFGMHWVRQAPGKGLEWVSYISSGSSTIYYADTLKGRFTISRDNSKNTLYLQMNSLRAEDTAVYYCARRGEGAGDYWGQGTTVTVSSASTKGPSVFPLAPSSKSTSGGTAALGCLVKDYFPEPVTVSWNSGALTSGVHTFPAVLQSSGLYSLSSVVTVPSSSLGTQTYICNVNHKPSNTKVDKKVEPKSC

SEQ ID NO: 1814 - protein, 220 aa, synthetic construct
EVQLVESGGGLVQPGGSLRLSCAASGFTFSNFGMHWVRQAPGKGLEWVSYISSGSSTIYYADTLKGRFTISRDNSKNTLYLQMNSLRAEDTAVYYCARRGEGAHDYWGQGTTVTVSSASTKGPSVFPLAPSSKSTSGGTAALGCLVKDYFPEPVTVSWNSGALTSGVHTFPAVLQSSGLYSLSSVVTVPSSSLGTQTYICNVNHKPSNTKVDKKVEPKSC

SEQ ID NO: 1815 - protein, 220 aa, synthetic construct
EVQLVESGGGLVQPGGSLRLSCAASGFTFSNFGMHWVRQAPGKGLEWVSYISSGSSTIYYADTLKGRFTISRDNSKNTLYLQMNSLRAEDTAVYYCARRGEGALDYWGQGTTVTVSSASTKGPSVFPLAPSSKSTSGGTAALGCLVKDYFPEPVTVSWNSGALTSGVHTFPAVLQSSGLYSLSSVVTVPSSSLGTQTYICNVNHKPSNTKVDKKVEPKSC

SEQ ID NO: 1816 - protein, 220 aa, synthetic construct
EVQLVESGGGLVQPGGSLRLSCAASGFTFSNFGMHWVRQAPGKGLEWVSYISSGSSTIYYADTLKGRFTISRDNSKNTLYLQMNSLRAEDTAVYYCARRGEGANDYWGQGTTVTVSSASTKGPSVFPLAPSSKSTSGGTAALGCLVKDYFPEPVTVSWNSGALTSGVHTFPAVLQSSGLYSLSSVVTVPSSSLGTQTYICNVNHKPSNTKVDKKVEPKSC

SEQ ID NO: 1817 - protein, 220 aa, synthetic construct
EVQLVESGGGLVQPGGSLRLSCAASGFTFSNFGMHWVRQAPGKGLEWVSYISSGSSTIYYADTLKGRFTISRDNSKNTLYLQMNSLRAEDTAVYYCARRGEGAPDYWGQGTTVTVSSASTKGPSVFPLAPSSKSTSGGTAALGCLVKDYFPEPVTVSWNSGALTSGVHTFPAVLQSSGLYSLSSVVTVPSSSLGTQTYICNVNHKPSNTKVDKKVEPKSC

SEQ ID NO: 1818 - protein, 220 aa, synthetic construct
EVQLVESGGGLVQPGGSLRLSCAASGFTFSNFGMHWVRQAPGKGLEWVSYISSGSSTIYYADTLKGRFTISRDNSKNTLYLQMNSLRAEDTAVYYCARRGEGAQDYWGQGTTVTVSSASTKGPSVFPLAPSSKSTSGGTAALGCLVKDYFPEPVTVSWNSGALTSGVHTFPAVLQSSGLYSLSSVVTVPSSSLGTQTYICNVNHKPSNTKVDKKVEPKSC

SEQ ID NO: 1819 - protein, 220 aa, synthetic construct
EVQLVESGGGLVQPGGSLRLSCAASGFTFSNFGMHWVRQAPGKGLEWVSYISSGSSTIYYADTLKGRFTISRDNSKNTLYLQMNSLRAEDTAVYYCARRGEGARDYWGQGTTVTVSSASTKGPSVFPLAPSSKSTSGGTAALGCLVKDYFPEPVTVSWNSGALTSGVHTFPAVLQSSGLYSLSSVVTVPSSSLGTQTYICNVNHKPSNTKVDKKVEPKSC

SEQ ID NO: 1820 - protein, 220 aa, synthetic construct
EVQLVESGGGLVQPGGSLRLSCAASGFTFSNFGMHWVRQAPGKGLEWVSYISSGSSTIYYADTLKGRFTISRDNSKNTLYLQMNSLRAEDTAVYYCARRGEGASDYWGQGTTVTVSSASTKGPSVFPLAPSSKSTSGGTAALGCLVKDYFPEPVTVSWNSGALTSGVHTFPAVLQSSGLYSLSSVVTVPSSSLGTQTYICNVNHKPSNTKVDKKVEPKSC

SEQ ID NO: 1821 - protein, 220 aa, synthetic construct
EVQLVESGGGLVQPGGSLRLSCAASGFTFSNFGMHWVRQAPGKGLEWVSYISSGSSTIYYADTLKGRFTISRDNSKNTLYLQMNSLRAEDTAVYYCARRGEGATDYWGQGTTVTVSSASTKGPSVFPLAPSSKSTSGGTAALGCLVKDYFPEPVTVSWNSGALTSGVHTFPAVLQSSGLYSLSSVVTVPSSSLGTQTYICNVNHKPSNTKVDKKVEPKSC

SEQ ID NO: 1822 - protein, 220 aa, synthetic construct
EVQLVESGGGLVQPGGSLRLSCAASGFTFSNFGMHWVRQAPGKGLEWVSYISSGSSTIYYADTLKGRFTISRDNSKNTLYLQMNSLRAEDTAVYYCARRGEGAWDYWGQGTTVTVSSASTKGPSVFPLAPSSKSTSGGTAALGCLVKDYFPEPVTVSWNSGALTSGVHTFPAVLQSSGLYSLSSVVTVPSSSLGTQTYICNVNHKPSNTKVDKKVEPKSC

SEQ ID NO: 1823 - protein, 220 aa, synthetic construct
EVQLVESGGGLVQPGGSLRLSCAASGFTFSNFGMHWVRQAPGKGLEWVSYISSGSSTIYYADTLKGRFTISRDNSKNTLYLQMNSLRAEDTAVYYCARRGEGAYDYWGQGTTVTVSSASTKGPSVFPLAPSSKSTSGGTAALGCLVKDYFPEPVTVSWNSGALTSGVHTFPAVLQSSGLYSLSSVVTVPSSSLGTQTYICNVNHKPSNTKVDKKVEPKSC

SEQ ID NO: 1824 - protein, 220 aa, synthetic construct
EVQLVESGGGLVQPGGSLRLSCAASGFTFSNFGMHWVRQAPGKGLEWVSYISSGSSTIYYADTLKGRFTISRDNSKNTLYLQMNSLRAEDTAVYYCARRGEGAMEYWGQGTTVTVSSASTKGPSVFPLAPSSKSTSGGTAALGCLVKDYFPEPVTVSWNSGALTSGVHTFPAVLQSSGLYSLSSVVTVPSSSLGTQTYICNVNHKPSNTKVDKKVEPKSC

SEQ ID NO: 1825 - protein, 220 aa, synthetic construct
EVQLVESGGGLVQPGGSLRLSCAASGFTFSNFGMHWVRQAPGKGLEWVSYISSGSSTIYYADTLKGRFTISRDNSKNTLYLQMNSLRAEDTAVYYCARRGEGAMFYWGQGTTVTVSSASTKGPSVFPLAPSSKSTSGGTAALGCLVKDYFPEPVTVSWNSGALTSGVHTFPAVLQSSGLYSLSSVVTVPSSSLGTQTYICNVNHKPSNTKVDKKVEPKSC

SEQ ID NO: 1826 - protein, 220 aa, synthetic construct
EVQLVESGGGLVQPGGSLRLSCAASGFTFSNFGMHWVRQAPGKGLEWVSYISSGSSTIYYADTLKGRFTISRDNSKNTLYLQMNSLRAEDTAVYYCARRGEGAMGYWGQGTTVTVSSASTKGPSVFPLAPSSKSTSGGTAALGCLVKDYFPEPVTVSWNSGALTSGVHTFPAVLQSSGLYSLSSVVTVPSSSLGTQTYICNVNHKPSNTKVDKKVEPKSC

SEQ ID NO: 1827 - protein, 220 aa, synthetic construct
EVQLVESGGGLVQPGGSLRLSCAASGFTFSNFGMHWVRQAPGKGLEWVSYISSGSSTIYYADTLKGRFTISRDNSKNTLYLQMNSLRAEDTAVYYCARRGEGAMHYWGQGTTVTVSSASTKGPSVFPLAPSSKSTSGGTAALGCLVKDYFPEPVTVSWNSGALTSGVHTFPAVLQSSGLYSLSSVVTVPSSSLGTQTYICNVNHKPSNTKVDKKVEPKSC

SEQ ID NO: 1828 - protein, 220 aa, synthetic construct
EVQLVESGGGLVQPGGSLRLSCAASGFTFSNFGMHWVRQAPGKGLEWVSYISSGSSTIYYADTLKGRFTISRDNSKNTLYLQMNSLRAEDTAVYYCARRGEGAMIYWGQGTTVTVSSASTKGPSVFPLAPSSKSTSGGTAALGCLVKDYFPEPVTVSWNSGALTSGVHTFPAVLQSSGLYSLSSVVTVPSSSLGTQTYICNVNHKPSNTKVDKKVEPKSC

SEQ ID NO: 1829 - protein, 220 aa, synthetic construct
EVQLVESGGGLVQPGGSLRLSCAASGFTFSNFGMHWVRQAPGKGLEWVSYISSGSSTIYYADTLKGRFTISRDNSKNTLYLQMNSLRAEDTAVYYCARRGEGAMKYWGQGTTVTVSSASTKGPSVFPLAPSSKSTSGGTAALGCLVKDYFPEPVTVSWNSGALTSGVHTFPAVLQSSGLYSLSSVVTVPSSSLGTQTYICNVNHKPSNTKVDKKVEPKSC

SEQ ID NO: 1830 - protein, 220 aa, synthetic construct
EVQLVESGGGLVQPGGSLRLSCAASGFTFSNFGMHWVRQAPGKGLEWVSYISSGSSTIYYADTLKGRFTISRDNSKNTLYLQMNSLRAEDTAVYYCARRGEGAMLYWGQGTTVTVSSASTKGPSVFPLAPSSKSTSGGTAALGCLVKDYFPEPVTVSWNSGALTSGVHTFPAVLQSSGLYSLSSVVTVPSSSLGTQTYICNVNHKPSNTKVDKKVEPKSC

SEQ ID NO: 1831 - protein, 220 aa, synthetic construct
EVQLVESGGGLVQPGGSLRLSCAASGFTFSNFGMHWVRQAPGKGLEWVSYISSGSSTIYYADTLKGRFTISRDNSKNTLYLQMNSLRAEDTAVYYCARRGEGAMMYWGQGTTVTVSSASTKGPSVFPLAPSSKSTSGGTAALGCLVKDYFPEPVTVSWNSGALTSGVHTFPAVLQSSGLYSLSSVVTVPSSSLGTQTYICNVNHKPSNTKVDKKVEPKSC

SEQ ID NO: 1832 - protein, 220 aa, synthetic construct
EVQLVESGGGLVQPGGSLRLSCAASGFTFSNFGMHWVRQAPGKGLEWVSYISSGSSTIYYADTLKGRFTISRDNSKNTLYLQMNSLRAEDTAVYYCARRGEGAMPYWGQGTTVTVSSASTKGPSVFPLAPSSKSTSGGTAALGCLVKDYFPEPVTVSWNSGALTSGVHTFPAVLQSSGLYSLSSVVTVPSSSLGTQTYICNVNHKPSNTKVDKKVEPKSC

SEQ ID NO: 1833 - protein, 220 aa, synthetic construct
EVQLVESGGGLVQPGGSLRLSCAASGFTFSNFGMHWVRQAPGKGLEWVSYISSGSSTIYYADTLKGRFTISRDNSKNTLYLQMNSLRAEDTAVYYCARRGEGAMQYWGQGTTVTVSSASTKGPSVFPLAPSSKSTSGGTAALGCLVKDYFPEPVTVSWNSGALTSGVHTFPAVLQSSGLYSLSSVVTVPSSSLGTQTYICNVNHKPSNTKVDKKVEPKSC

SEQ ID NO: 1834 - protein, 220 aa, synthetic construct
EVQLVESGGGLVQPGGSLRLSCAASGFTFSNFGMHWVRQAPGKGLEWVSYISSGSSTIYYADTLKGRFTISRDNSKNTLYLQMNSLRAEDTAVYYCARRGEGAMRYWGQGTTVTVSSASTKGPSVFPLAPSSKSTSGGTAALGCLVKDYFPEPVTVSWNSGALTSGVHTFPAVLQSSGLYSLSSVVTVPSSSLGTQTYICNVNHKPSNTKVDKKVEPKSC

SEQ ID NO: 1835 - protein, 220 aa, synthetic construct
EVQLVESGGGLVQPGGSLRLSCAASGFTFSNFGMHWVRQAPGKGLEWVSYISSGSSTIYYADTLKGRFTISRDNSKNTLYLQMNSLRAEDTAVYYCARRGEGAMSYWGQGTTVTVSSASTKGPSVFPLAPSSKSTSGGTAALGCLVKDYFPEPVTVSWNSGALTSGVHTFPAVLQSSGLYSLSSVVTVPSSSLGTQTYICNVNHKPSNTKVDKKVEPKSC

SEQ ID NO: 1836 - protein, 220 aa, synthetic construct
EVQLVESGGGLVQPGGSLRLSCAASGFTFSNFGMHWVRQAPGKGLEWVSYISSGSSTIYYADTLKGRFTISRDNSKNTLYLQMNSLRAEDTAVYYCARRGEGAMTYWGQGTTVTVSSASTKGPSVFPLAPSSKSTSGGTAALGCLVKDYFPEPVTVSWNSGALTSGVHTFPAVLQSSGLYSLSSVVTVPSSSLGTQTYICNVNHKPSNTKVDKKVEPKSC

SEQ ID NO: 1837 - protein, 220 aa, synthetic construct
EVQLVESGGGLVQPGGSLRLSCAASGFTFSNFGMHWVRQAPGKGLEWVSYISSGSSTIYYADTLKGRFTISRDNSKNTLYLQMNSLRAEDTAVYYCARRGEGAMVYWGQGTTVTVSSASTKGPSVFPLAPSSKSTSGGTAALGCLVKDYFPEPVTVSWNSGALTSGVHTFPAVLQSSGLYSLSSVVTVPSSSLGTQTYICNVNHKPSNTKVDKKVEPKSC

SEQ ID NO: 1838 - protein, 220 aa, synthetic construct
EVQLVESGGGLVQPGGSLRLSCAASGFTFSNFGMHWVRQAPGKGLEWVSYISSGSSTIYYADTLKGRFTISRDNSKNTLYLQMNSLRAEDTAVYYCARRGEGAMWYWGQGTTVTVSSASTKGPSVFPLAPSSKSTSGGTAALGCLVKDYFPEPVTVSWNSGALTSGVHTFPAVLQSSGLYSLSSVVTVPSSSLGTQTYICNVNHKPSNTKVDKKVEPKSC

SEQ ID NO: 1839 - protein, 220 aa, synthetic construct
EVQLVESGGGLVQPGGSLRLSCAASGFTFSNFGMHWVRQAPGKGLEWVSYISSGSSTIYYADTLKGRFTISRDNSKNTLYLQMNSLRAEDTAVYYCARRGEGAMYYWGQGTTVTVSSASTKGPSVFPLAPSSKSTSGGTAALGCLVKDYFPEPVTVSWNSGALTSGVHTFPAVLQSSGLYSLSSVVTVPSSSLGTQTYICNVNHKPSNTKVDKKVEPKSC

SEQ ID NO: 1840 - protein, 220 aa, synthetic construct
EVQLVESGGGLVQPGGSLRLSCAASGFTFSNFGMHWVRQAPGKGLEWVSYISSGSSTIYYADTLKGRFTISRDNSKNTLYLQMNSLRAEDTAVYYCARRGEGAMDDWGQGTTVTVSSASTKGPSVFPLAPSSKSTSGGTAALGCLVKDYFPEPVTVSWNSGALTSGVHTFPAVLQSSGLYSLSSVVTVPSSSLGTQTYICNVNHKPSNTKVDKKVEPKSC

SEQ ID NO: 1841 - protein, 220 aa, synthetic construct
EVQLVESGGGLVQPGGSLRLSCAASGFTFSNFGMHWVRQAPGKGLEWVSYISSGSSTIYYADTLKGRFTISRDNSKNTLYLQMNSLRAEDTAVYYCARRGEGAMDFWGQGTTVTVSSASTKGPSVFPLAPSSKSTSGGTAALGCLVKDYFPEPVTVSWNSGALTSGVHTFPAVLQSSGLYSLSSVVTVPSSSLGTQTYICNVNHKPSNTKVDKKVEPKSC

SEQ ID NO: 1842 - protein, 220 aa, synthetic construct
EVQLVESGGGLVQPGGSLRLSCAASGFTFSNFGMHWVRQAPGKGLEWVSYISSGSSTIYYADTLKGRFTISRDNSKNTLYLQMNSLRAEDTAVYYCARRGEGAMDGWGQGTTVTVSSASTKGPSVFPLAPSSKSTSGGTAALGCLVKDYFPEPVTVSWNSGALTSGVHTFPAVLQSSGLYSLSSVVTVPSSSLGTQTYICNVNHKPSNTKVDKKVEPKSC

SEQ ID NO: 1843 - protein, 220 aa, synthetic construct
EVQLVESGGGLVQPGGSLRLSCAASGFTFSNFGMHWVRQAPGKGLEWVSYISSGSSTIYYADTLKGRFTISRDNSKNTLYLQMNSLRAEDTAVYYCARRGEGAMDHWGQGTTVTVSSASTKGPSVFPLAPSSKSTSGGTAALGCLVKDYFPEPVTVSWNSGALTSGVHTFPAVLQSSGLYSLSSVVTVPSSSLGTQTYICNVNHKPSNTKVDKKVEPKSC

SEQ ID NO: 1844 - protein, 220 aa, synthetic construct
EVQLVESGGGLVQPGGSLRLSCAASGFTFSNFGMHWVRQAPGKGLEWVSYISSGSSTIYYADTLKGRFTISRDNSKNTLYLQMNSLRAEDTAVYYCARRGEGAMDLWGQGTTVTVSSASTKGPSVFPLAPSSKSTSGGTAALGCLVKDYFPEPVTVSWNSGALTSGVHTFPAVLQSSGLYSLSSVVTVPSSSLGTQTYICNVNHKPSNTKVDKKVEPKSC

SEQ ID NO: 1845 - protein, 220 aa, synthetic construct
EVQLVESGGGLVQPGGSLRLSCAASGFTFSNFGMHWVRQAPGKGLEWVSYISSGSSTIYYADTLKGRFTISRDNSKNTLYLQMNSLRAEDTAVYYCARRGEGAMDMWGQGTTVTVSSASTKGPSVFPLAPSSKSTSGGTAALGCLVKDYFPEPVTVSWNSGALTSGVHTFPAVLQSSGLYSLSSVVTVPSSSLGTQTYICNVNHKPSNTKVDKKVEPKSC

SEQ ID NO: 1846 - protein, 220 aa, synthetic construct
EVQLVESGGGLVQPGGSLRLSCAASGFTFSNFGMHWVRQAPGKGLEWVSYISSGSSTIYYADTLKGRFTISRDNSKNTLYLQMNSLRAEDTAVYYCARRGEGAMDPWGQGTTVTVSSASTKGPSVFPLAPSSKSTSGGTAALGCLVKDYFPEPVTVSWNSGALTSGVHTFPAVLQSSGLYSLSSVVTVPSSSLGTQTYICNVNHKPSNTKVDKKVEPKSC

SEQ ID NO: 1847 - protein, 220 aa, synthetic construct
EVQLVESGGGLVQPGGSLRLSCAASGFTFSNFGMHWVRQAPGKGLEWVSYISSGSSTIYYADTLKGRFTISRDNSKNTLYLQMNSLRAEDTAVYYCARRGEGAMDQWGQGTTVTVSSASTKGPSVFPLAPSSKSTSGGTAALGCLVKDYFPEPVTVSWNSGALTSGVHTFPAVLQSSGLYSLSSVVTVPSSSLGTQTYICNVNHKPSNTKVDKKVEPKSC

SEQ ID NO: 1848 - protein, 220 aa, synthetic construct
EVQLVESGGGLVQPGGSLRLSCAASGFTFSNFGMHWVRQAPGKGLEWVSYISSGSSTIYYADTLKGRFTISRDNSKNTLYLQMNSLRAEDTAVYYCARRGEGAMDRWGQGTTVTVSSASTKGPSVFPLAPSSKSTSGGTAALGCLVKDYFPEPVTVSWNSGALTSGVHTFPAVLQSSGLYSLSSVVTVPSSSLGTQTYICNVNHKPSNTKVDKKVEPKSC

SEQ ID NO: 1849 - protein, 220 aa, synthetic construct
EVQLVESGGGLVQPGGSLRLSCAASGFTFSNFGMHWVRQAPGKGLEWVSYISSGSSTIYYADTLKGRFTISRDNSKNTLYLQMNSLRAEDTAVYYCARRGEGAMDSWGQGTTVTVSSASTKGPSVFPLAPSSKSTSGGTAALGCLVKDYFPEPVTVSWNSGALTSGVHTFPAVLQSSGLYSLSSVVTVPSSSLGTQTYICNVNHKPSNTKVDKKVEPKSC

SEQ ID NO: 1850 - protein, 220 aa, synthetic construct
EVQLVESGGGLVQPGGSLRLSCAASGFTFSNFGMHWVRQAPGKGLEWVSYISSGSSTIYYADTLKGRFTISRDNSKNTLYLQMNSLRAEDTAVYYCARRGEGAMDTWGQGTTVTVSSASTKGPSVFPLAPSSKSTSGGTAALGCLVKDYFPEPVTVSWNSGALTSGVHTFPAVLQSSGLYSLSSVVTVPSSSLGTQTYICNVNHKPSNTKVDKKVEPKSC

SEQ ID NO: 1851 - protein, 220 aa, synthetic construct
EVQLVESGGGLVQPGGSLRLSCAASGFTFSNFGMHWVRQAPGKGLEWVSYISSGSSTIYYADTLKGRFTISRDNSKNTLYLQMNSLRAEDTAVYYCARRGEGAMDVWGQGTTVTVSSASTKGPSVFPLAPSSKSTSGGTAALGCLVKDYFPEPVTVSWNSGALTSGVHTFPAVLQSSGLYSLSSVVTVPSSSLGTQTYICNVNHKPSNTKVDKKVEPKSC

SEQ ID NO: 1852 - protein, 213 aa, synthetic construct
DNQLTQSPSFLSASVGDRVTITCRAASSVNYIYWYQQKPGKAPKLLIYYTSNLAPGVPSRFSGSGSGNEYTLTISSLQPEDFATYYCQQFTSSPFTFGQGTKLEIKRTVAAPSVFIFPPSDEQLKSGTASVVCLLNNFYPREAKVQWKVDNALQSGNSQESVTEQDSKDSTYSLSSTLTLSKADYEKHKVYACEVTHQGLSSPVTKSFNRGEC

SEQ ID NO: 1853 - protein, 213 aa, synthetic construct
DNQLTQSPSFLSASVGDRVTITCRADSSVNYIYWYQQKPGKAPKLLIYYTSNLAPGVPSRFSGSGSGNEYTLTISSLQPEDFATYYCQQFTSSPFTFGQGTKLEIKRTVAAPSVFIFPPSDEQLKSGTASVVCLLNNFYPREAKVQWKVDNALQSGNSQESVTEQDSKDSTYSLSSTLTLSKADYEKHKVYACEVTHQGLSSPVTKSFNRGEC

SEQ ID NO: 1854 - protein, 213 aa, synthetic construct
DNQLTQSPSFLSASVGDRVTITCRAFSSVNYIYWYQQKPGKAPKLLIYYTSNLAPGVPSRFSGSGSGNEYTLTISSLQPEDFATYYCQQFTSSPFTFGQGTKLEIKRTVAAPSVFIFPPSDEQLKSGTASVVCLLNNFYPREAKVQWKVDNALQSGNSQESVTEQDSKDSTYSLSSTLTLSKADYEKHKVYACEVTHQGLSSPVTKSFNRGEC

SEQ ID NO: 1855 - protein, 213 aa, synthetic construct
DNQLTQSPSFLSASVGDRVTITCRAGSSVNYIYWYQQKPGKAPKLLIYYTSNLAPGVPSRFSGSGSGNEYTLTISSLQPEDFATYYCQQFTSSPFTFGQGTKLEIKRTVAAPSVFIFPPSDEQLKSGTASVVCLLNNFYPREAKVQWKVDNALQSGNSQESVTEQDSKDSTYSLSSTLTLSKADYEKHKVYACEVTHQGLSSPVTKSFNRGEC

SEQ ID NO: 1856 - protein, 213 aa, synthetic construct
DNQLTQSPSFLSASVGDRVTITCRAHSSVNYIYWYQQKPGKAPKLLIYYTSNLAPGVPSRFSGSGSGNEYTLTISSLQPEDFATYYCQQFTSSPFTFGQGTKLEIKRTVAAPSVFIFPPSDEQLKSGTASVVCLLNNFYPREAKVQWKVDNALQSGNSQESVTEQDSKDSTYSLSSTLTLSKADYEKHKVYACEVTHQGLSSPVTKSFNRGEC

SEQ ID NO: 1857 - protein, 213 aa, synthetic construct
DNQLTQSPSFLSASVGDRVTITCRAISSVNYIYWYQQKPGKAPKLLIYYTSNLAPGVPSRFSGSGSGNEYTLTISSLQPEDFATYYCQQFTSSPFTFGQGTKLEIKRTVAAPSVFIFPPSDEQLKSGTASVVCLLNNFYPREAKVQWKVDNALQSGNSQESVTEQDSKDSTYSLSSTLTLSKADYEKHKVYACEVTHQGLSSPVTKSFNRGEC

SEQ ID NO: 1858 - protein, 213 aa, synthetic construct
DNQLTQSPSFLSASVGDRVTITCRAKSSVNYIYWYQQKPGKAPKLLIYYTSNLAPGVPSRFSGSGSGNEYTLTISSLQPEDFATYYCQQFTSSPFTFGQGTKLEIKRTVAAPSVFIFPPSDEQLKSGTASVVCLLNNFYPREAKVQWKVDNALQSGNSQESVTEQDSKDSTYSLSSTLTLSKADYEKHKVYACEVTHQGLSSPVTKSFNRGEC

SEQ ID NO: 1859 - protein, 213 aa, synthetic construct
DNQLTQSPSFLSASVGDRVTITCRALSSVNYIYWYQQKPGKAPKLLIYYTSNLAPGVPSRFSGSGSGNEYTLTISSLQPEDFATYYCQQFTSSPFTFGQGTKLEIKRTVAAPSVFIFPPSDEQLKSGTASVVCLLNNFYPREAKVQWKVDNALQSGNSQESVTEQDSKDSTYSLSSTLTLSKADYEKHKVYACEVTHQGLSSPVTKSFNRGEC

SEQ ID NO: 1860 - protein, 213 aa, synthetic construct
DNQLTQSPSFLSASVGDRVTITCRANSSVNYIYWYQQKPGKAPKLLIYYTSNLAPGVPSRFSGSGSGNEYTLTISSLQPEDFATYYCQQFTSSPFTFGQGTKLEIKRTVAAPSVFIFPPSDEQLKSGTASVVCLLNNFYPREAKVQWKVDNALQSGNSQESVTEQDSKDSTYSLSSTLTLSKADYEKHKVYACEVTHQGLSSPVTKSFNRGEC

SEQ ID NO: 1861 - protein, 213 aa, synthetic construct
DNQLTQSPSFLSASVGDRVTITCRAPSSVNYIYWYQQKPGKAPKLLIYYTSNLAPGVPSRFSGSGSGNEYTLTISSLQPEDFATYYCQQFTSSPFTFGQGTKLEIKRTVAAPSVFIFPPSDEQLKSGTASVVCLLNNFYPREAKVQWKVDNALQSGNSQESVTEQDSKDSTYSLSSTLTLSKADYEKHKVYACEVTHQGLSSPVTKSFNRGEC

SEQ ID NO: 1862 - protein, 213 aa, synthetic construct
DNQLTQSPSFLSASVGDRVTITCRAQSSVNYIYWYQQKPGKAPKLLIYYTSNLAPGVPSRFSGSGSGNEYTLTISSLQPEDFATYYCQQFTSSPFTFGQGTKLEIKRTVAAPSVFIFPPSDEQLKSGTASVVCLLNNFYPREAKVQWKVDNALQSGNSQESVTEQDSKDSTYSLSSTLTLSKADYEKHKVYACEVTHQGLSSPVTKSFNRGEC

SEQ ID NO: 1863 - protein, 213 aa, synthetic construct
DNQLTQSPSFLSASVGDRVTITCRARSSVNYIYWYQQKPGKAPKLLIYYTSNLAPGVPSRFSGSGSGNEYTLTISSLQPEDFATYYCQQFTSSPFTFGQGTKLEIKRTVAAPSVFIFPPSDEQLKSGTASVVCLLNNFYPREAKVQWKVDNALQSGNSQESVTEQDSKDSTYSLSSTLTLSKADYEKHKVYACEVTHQGLSSPVTKSFNRGEC

SEQ ID NO: 1864 - protein, 213 aa, synthetic construct
DNQLTQSPSFLSASVGDRVTITCRATSSVNYIYWYQQKPGKAPKLLIYYTSNLAPGVPSRFSGSGSGNEYTLTISSLQPEDFATYYCQQFTSSPFTFGQGTKLEIKRTVAAPSVFIFPPSDEQLKSGTASVVCLLNNFYPREAKVQWKVDNALQSGNSQESVTEQDSKDSTYSLSSTLTLSKADYEKHKVYACEVTHQGLSSPVTKSFNRGEC

SEQ ID NO: 1865 - protein, 213 aa, synthetic construct
DNQLTQSPSFLSASVGDRVTITCRAVSSVNYIYWYQQKPGKAPKLLIYYTSNLAPGVPSRFSGSGSGNEYTLTISSLQPEDFATYYCQQFTSSPFTFGQGTKLEIKRTVAAPSVFIFPPSDEQLKSGTASVVCLLNNFYPREAKVQWKVDNALQSGNSQESVTEQDSKDSTYSLSSTLTLSKADYEKHKVYACEVTHQGLSSPVTKSFNRGEC

SEQ ID NO: 1866 - protein, 213 aa, synthetic construct
DNQLTQSPSFLSASVGDRVTITCRAWSSVNYIYWYQQKPGKAPKLLIYYTSNLAPGVPSRFSGSGSGNEYTLTISSLQPEDFATYYCQQFTSSPFTFGQGTKLEIKRTVAAPSVFIFPPSDEQLKSGTASVVCLLNNFYPREAKVQWKVDNALQSGNSQESVTEQDSKDSTYSLSSTLTLSKADYEKHKVYACEVTHQGLSSPVTKSFNRGEC

SEQ ID NO: 1867 - protein, 213 aa, synthetic construct
DNQLTQSPSFLSASVGDRVTITCRAYSSVNYIYWYQQKPGKAPKLLIYYTSNLAPGVPSRFSGSGSGNEYTLTISSLQPEDFATYYCQQFTSSPFTFGQGTKLEIKRTVAAPSVFIFPPSDEQLKSGTASVVCLLNNFYPREAKVQWKVDNALQSGNSQESVTEQDSKDSTYSLSSTLTLSKADYEKHKVYACEVTHQGLSSPVTKSFNRGEC

SEQ ID NO: 1868 - protein, 213 aa, synthetic construct
DNQLTQSPSFLSASVGDRVTITCRASASVNYIYWYQQKPGKAPKLLIYYTSNLAPGVPSRFSGSGSGNEYTLTISSLQPEDFATYYCQQFTSSPFTFGQGTKLEIKRTVAAPSVFIFPPSDEQLKSGTASVVCLLNNFYPREAKVQWKVDNALQSGNSQESVTEQDSKDSTYSLSSTLTLSKADYEKHKVYACEVTHQGLSSPVTKSFNRGEC

SEQ ID NO: 1869 - protein, 213 aa, synthetic construct
DNQLTQSPSFLSASVGDRVTITCRASDSVNYIYWYQQKPGKAPKLLIYYTSNLAPGVPSRFSGSGSGNEYTLTISSLQPEDFATYYCQQFTSSPFTFGQGTKLEIKRTVAAPSVFIFPPSDEQLKSGTASVVCLLNNFYPREAKVQWKVDNALQSGNSQESVTEQDSKDSTYSLSSTLTLSKADYEKHKVYACEVTHQGLSSPVTKSFNRGEC

SEQ ID NO: 1870 - protein, 213 aa, synthetic construct
DNQLTQSPSFLSASVGDRVTITCRASESVNYIYWYQQKPGKAPKLLIYYTSNLAPGVPSRFSGSGSGNEYTLTISSLQPEDFATYYCQQFTSSPFTFGQGTKLEIKRTVAAPSVFIFPPSDEQLKSGTASVVCLLNNFYPREAKVQWKVDNALQSGNSQESVTEQDSKDSTYSLSSTLTLSKADYEKHKVYACEVTHQGLSSPVTKSFNRGEC

SEQ ID NO: 1871 - protein, 213 aa, synthetic construct
DNQLTQSPSFLSASVGDRVTITCRASFSVNYIYWYQQKPGKAPKLLIYYTSNLAPGVPSRFSGSGSGNEYTLTISSLQPEDFATYYCQQFTSSPFTFGQGTKLEIKRTVAAPSVFIFPPSDEQLKSGTASVVCLLNNFYPREAKVQWKVDNALQSGNSQESVTEQDSKDSTYSLSSTLTLSKADYEKHKVYACEVTHQGLSSPVTKSFNRGEC

SEQ ID NO: 1872 - protein, 213 aa, synthetic construct
DNQLTQSPSFLSASVGDRVTITCRASGSVNYIYWYQQKPGKAPKLLIYYTSNLAPGVPSRFSGSGSGNEYTLTISSLQPEDFATYYCQQFTSSPFTFGQGTKLEIKRTVAAPSVFIFPPSDEQLKSGTASVVCLLNNFYPREAKVQWKVDNALQSGNSQESVTEQDSKDSTYSLSSTLTLSKADYEKHKVYACEVTHQGLSSPVTKSFNRGEC

SEQ ID NO: 1873 - protein, 213 aa, synthetic construct
DNQLTQSPSFLSASVGDRVTITCRASHSVNYIYWYQQKPGKAPKLLIYYTSNLAPGVPSRFSGSGSGNEYTLTISSLQPEDFATYYCQQFTSSPFTFGQGTKLEIKRTVAAPSVFIFPPSDEQLKSGTASVVCLLNNFYPREAKVQWKVDNALQSGNSQESVTEQDSKDSTYSLSSTLTLSKADYEKHKVYACEVTHQGLSSPVTKSFNRGEC

SEQ ID NO: 1874 - protein, 213 aa, synthetic construct
DNQLTQSPSFLSASVGDRVTITCRASISVNYIYWYQQKPGKAPKLLIYYTSNLAPGVPSRFSGSGSGNEYTLTISSLQPEDFATYYCQQFTSSPFTFGQGTKLEIKRTVAAPSVFIFPPSDEQLKSGTASVVCLLNNFYPREAKVQWKVDNALQSGNSQESVTEQDSKDSTYSLSSTLTLSKADYEKHKVYACEVTHQGLSSPVTKSFNRGEC

SEQ ID NO: 1875 - protein, 213 aa, synthetic construct
DNQLTQSPSFLSASVGDRVTITCRASLSVNYIYWYQQKPGKAPKLLIYYTSNLAPGVPSRFSGSGSGNEYTLTISSLQPEDFATYYCQQFTSSPFTFGQGTKLEIKRTVAAPSVFIFPPSDEQLKSGTASVVCLLNNFYPREAKVQWKVDNALQSGNSQESVTEQDSKDSTYSLSSTLTLSKADYEKHKVYACEVTHQGLSSPVTKSFNRGEC

SEQ ID NO: 1876 - protein, 213 aa, synthetic construct
DNQLTQSPSFLSASVGDRVTITCRASMSVNYIYWYQQKPGKAPKLLIYYTSNLAPGVPSRFSGSGSGNEYTLTISSLQPEDFATYYCQQFTSSPFTFGQGTKLEIKRTVAAPSVFIFPPSDEQLKSGTASVVCLLNNFYPREAKVQWKVDNALQSGNSQESVTEQDSKDSTYSLSSTLTLSKADYEKHKVYACEVTHQGLSSPVTKSFNRGEC

SEQ ID NO: 1877 - protein, 213 aa, synthetic construct
DNQLTQSPSFLSASVGDRVTITCRASNSVNYIYWYQQKPGKAPKLLIYYTSNLAPGVPSRFSGSGSGNEYTLTISSLQPEDFATYYCQQFTSSPFTFGQGTKLEIKRTVAAPSVFIFPPSDEQLKSGTASVVCLLNNFYPREAKVQWKVDNALQSGNSQESVTEQDSKDSTYSLSSTLTLSKADYEKHKVYACEVTHQGLSSPVTKSFNRGEC

SEQ ID NO: 1878 - protein, 213 aa, synthetic construct
DNQLTQSPSFLSASVGDRVTITCRASPSVNYIYWYQQKPGKAPKLLIYYTSNLAPGVPSRFSGSGSGNEYTLTISSLQPEDFATYYCQQFTSSPFTFGQGTKLEIKRTVAAPSVFIFPPSDEQLKSGTASVVCLLNNFYPREAKVQWKVDNALQSGNSQESVTEQDSKDSTYSLSSTLTLSKADYEKHKVYACEVTHQGLSSPVTKSFNRGEC

SEQ ID NO: 1879 - protein, 213 aa, synthetic construct
DNQLTQSPSFLSASVGDRVTITCRASQSVNYIYWYQQKPGKAPKLLIYYTSNLAPGVPSRFSGSGSGNEYTLTISSLQPEDFATYYCQQFTSSPFTFGQGTKLEIKRTVAAPSVFIFPPSDEQLKSGTASVVCLLNNFYPREAKVQWKVDNALQSGNSQESVTEQDSKDSTYSLSSTLTLSKADYEKHKVYACEVTHQGLSSPVTKSFNRGEC

SEQ ID NO: 1880 - protein, 213 aa, synthetic construct
DNQLTQSPSFLSASVGDRVTITCRASTSVNYIYWYQQKPGKAPKLLIYYTSNLAPGVPSRFSGSGSGNEYTLTISSLQPEDFATYYCQQFTSSPFTFGQGTKLEIKRTVAAPSVFIFPPSDEQLKSGTASVVCLLNNFYPREAKVQWKVDNALQSGNSQESVTEQDSKDSTYSLSSTLTLSKADYEKHKVYACEVTHQGLSSPVTKSFNRGEC

SEQ ID NO: 1881 - protein, 213 aa, synthetic construct
DNQLTQSPSFLSASVGDRVTITCRASVSVNYIYWYQQKPGKAPKLLIYYTSNLAPGVPSRFSGSGSGNEYTLTISSLQPEDFATYYCQQFTSSPFTFGQGTKLEIKRTVAAPSVFIFPPSDEQLKSGTASVVCLLNNFYPREAKVQWKVDNALQSGNSQESVTEQDSKDSTYSLSSTLTLSKADYEKHKVYACEVTHQGLSSPVTKSFNRGEC

SEQ ID NO: 1882 - protein, 213 aa, synthetic construct
DNQLTQSPSFLSASVGDRVTITCRASWSVNYIYWYQQKPGKAPKLLIYYTSNLAPGVPSRFSGSGSGNEYTLTISSLQPEDFATYYCQQFTSSPFTFGQGTKLEIKRTVAAPSVFIFPPSDEQLKSGTASVVCLLNNFYPREAKVQWKVDNALQSGNSQESVTEQDSKDSTYSLSSTLTLSKADYEKHKVYACEVTHQGLSSPVTKSFNRGEC

SEQ ID NO: 1883 - protein, 213 aa, synthetic construct
DNQLTQSPSFLSASVGDRVTITCRASYSVNYIYWYQQKPGKAPKLLIYYTSNLAPGVPSRFSGSGSGNEYTLTISSLQPEDFATYYCQQFTSSPFTFGQGTKLEIKRTVAAPSVFIFPPSDEQLKSGTASVVCLLNNFYPREAKVQWKVDNALQSGNSQESVTEQDSKDSTYSLSSTLTLSKADYEKHKVYACEVTHQGLSSPVTKSFNRGEC

SEQ ID NO: 1884 - protein, 213 aa, synthetic construct
DNQLTQSPSFLSASVGDRVTITCRASSAVNYIYWYQQKPGKAPKLLIYYTSNLAPGVPSRFSGSGSGNEYTLTISSLQPEDFATYYCQQFTSSPFTFGQGTKLEIKRTVAAPSVFIFPPSDEQLKSGTASVVCLLNNFYPREAKVQWKVDNALQSGNSQESVTEQDSKDSTYSLSSTLTLSKADYEKHKVYACEVTHQGLSSPVTKSFNRGEC

SEQ ID NO: 1885 - protein, 213 aa, synthetic construct
DNQLTQSPSFLSASVGDRVTITCRASSDVNYIYWYQQKPGKAPKLLIYYTSNLAPGVPSRFSGSGSGNEYTLTISSLQPEDFATYYCQQFTSSPFTFGQGTKLEIKRTVAAPSVFIFPPSDEQLKSGTASVVCLLNNFYPREAKVQWKVDNALQSGNSQESVTEQDSKDSTYSLSSTLTLSKADYEKHKVYACEVTHQGLSSPVTKSFNRGEC

SEQ ID NO: 1886 - protein, 213 aa, synthetic construct
DNQLTQSPSFLSASVGDRVTITCRASSEVNYIYWYQQKPGKAPKLLIYYTSNLAPGVPSRFSGSGSGNEYTLTISSLQPEDFATYYCQQFTSSPFTFGQGTKLEIKRTVAAPSVFIFPPSDEQLKSGTASVVCLLNNFYPREAKVQWKVDNALQSGNSQESVTEQDSKDSTYSLSSTLTLSKADYEKHKVYACEVTHQGLSSPVTKSFNRGEC

SEQ ID NO: 1887 - protein, 213 aa, synthetic construct
DNQLTQSPSFLSASVGDRVTITCRASSFVNYIYWYQQKPGKAPKLLIYYTSNLAPGVPSRFSGSGSGNEYTLTISSLQPEDFATYYCQQFTSSPFTFGQGTKLEIKRTVAAPSVFIFPPSDEQLKSGTASVVCLLNNFYPREAKVQWKVDNALQSGNSQESVTEQDSKDSTYSLSSTLTLSKADYEKHKVYACEVTHQGLSSPVTKSFNRGEC

SEQ ID NO: 1888 - protein, 213 aa, synthetic construct
DNQLTQSPSFLSASVGDRVTITCRASSGVNYIYWYQQKPGKAPKLLIYYTSNLAPGVPSRFSGSGSGNEYTLTISSLQPEDFATYYCQQFTSSPFTFGQGTKLEIKRTVAAPSVFIFPPSDEQLKSGTASVVCLLNNFYPREAKVQWKVDNALQSGNSQESVTEQDSKDSTYSLSSTLTLSKADYEKHKVYACEVTHQGLSSPVTKSFNRGEC

SEQ ID NO: 1889 - protein, 213 aa, synthetic construct
DNQLTQSPSFLSASVGDRVTITCRASSHVNYIYWYQQKPGKAPKLLIYYTSNLAPGVPSRFSGSGSGNEYTLTISSLQPEDFATYYCQQFTSSPFTFGQGTKLEIKRTVAAPSVFIFPPSDEQLKSGTASVVCLLNNFYPREAKVQWKVDNALQSGNSQESVTEQDSKDSTYSLSSTLTLSKADYEKHKVYACEVTHQGLSSPVTKSFNRGEC

SEQ ID NO: 1890 - protein, 213 aa, synthetic construct
DNQLTQSPSFLSASVGDRVTITCRASSIVNYIYWYQQKPGKAPKLLIYYTSNLAPGVPSRFSGSGSGNEYTLTISSLQPEDFATYYCQQFTSSPFTFGQGTKLEIKRTVAAPSVFIFPPSDEQLKSGTASVVCLLNNFYPREAKVQWKVDNALQSGNSQESVTEQDSKDSTYSLSSTLTLSKADYEKHKVYACEVTHQGLSSPVTKSFNRGEC

SEQ ID NO: 1891 - protein, 213 aa, synthetic construct
DNQLTQSPSFLSASVGDRVTITCRASSMVNYIYWYQQKPGKAPKLLIYYTSNLAPGVPSRFSGSGSGNEYTLTISSLQPEDFATYYCQQFTSSPFTFGQGTKLEIKRTVAAPSVFIFPPSDEQLKSGTASVVCLLNNFYPREAKVQWKVDNALQSGNSQESVTEQDSKDSTYSLSSTLTLSKADYEKHKVYACEVTHQGLSSPVTKSFNRGEC

SEQ ID NO: 1892 - protein, 213 aa, synthetic construct
DNQLTQSPSFLSASVGDRVTITCRASSNVNYIYWYQQKPGKAPKLLIYYTSNLAPGVPSRFSGSGSGNEYTLTISSLQPEDFATYYCQQFTSSPFTFGQGTKLEIKRTVAAPSVFIFPPSDEQLKSGTASVVCLLNNFYPREAKVQWKVDNALQSGNSQESVTEQDSKDSTYSLSSTLTLSKADYEKHKVYACEVTHQGLSSPVTKSFNRGEC

SEQ ID NO: 1893 - protein, 213 aa, synthetic construct
DNQLTQSPSFLSASVGDRVTITCRASSPVNYIYWYQQKPGKAPKLLIYYTSNLAPGVPSRFSGSGSGNEYTLTISSLQPEDFATYYCQQFTSSPFTFGQGTKLEIKRTVAAPSVFIFPPSDEQLKSGTASVVCLLNNFYPREAKVQWKVDNALQSGNSQESVTEQDSKDSTYSLSSTLTLSKADYEKHKVYACEVTHQGLSSPVTKSFNRGEC

SEQ ID NO: 1894 - protein, 213 aa, synthetic construct
DNQLTQSPSFLSASVGDRVTITCRASSQVNYIYWYQQKPGKAPKLLIYYTSNLAPGVPSRFSGSGSGNEYTLTISSLQPEDFATYYCQQFTSSPFTFGQGTKLEIKRTVAAPSVFIFPPSDEQLKSGTASVVCLLNNFYPREAKVQWKVDNALQSGNSQESVTEQDSKDSTYSLSSTLTLSKADYEKHKVYACEVTHQGLSSPVTKSFNRGEC

SEQ ID NO: 1895 - protein, 213 aa, synthetic construct
DNQLTQSPSFLSASVGDRVTITCRASSRVNYIYWYQQKPGKAPKLLIYYTSNLAPGVPSRFSGSGSGNEYTLTISSLQPEDFATYYCQQFTSSPFTFGQGTKLEIKRTVAAPSVFIFPPSDEQLKSGTASVVCLLNNFYPREAKVQWKVDNALQSGNSQESVTEQDSKDSTYSLSSTLTLSKADYEKHKVYACEVTHQGLSSPVTKSFNRGEC

SEQ ID NO: 1896 - protein, 213 aa, synthetic construct
DNQLTQSPSFLSASVGDRVTITCRASSTVNYIYWYQQKPGKAPKLLIYYTSNLAPGVPSRFSGSGSGNEYTLTISSLQPEDFATYYCQQFTSSPFTFGQGTKLEIKRTVAAPSVFIFPPSDEQLKSGTASVVCLLNNFYPREAKVQWKVDNALQSGNSQESVTEQDSKDSTYSLSSTLTLSKADYEKHKVYACEVTHQGLSSPVTKSFNRGEC

SEQ ID NO: 1897 - protein, 213 aa, synthetic construct
DNQLTQSPSFLSASVGDRVTITCRASSVVNYIYWYQQKPGKAPKLLIYYTSNLAPGVPSRFSGSGSGNEYTLTISSLQPEDFATYYCQQFTSSPFTFGQGTKLEIKRTVAAPSVFIFPPSDEQLKSGTASVVCLLNNFYPREAKVQWKVDNALQSGNSQESVTEQDSKDSTYSLSSTLTLSKADYEKHKVYACEVTHQGLSSPVTKSFNRGEC

SEQ ID NO: 1898 - protein, 213 aa, synthetic construct
DNQLTQSPSFLSASVGDRVTITCRASSWVNYIYWYQQKPGKAPKLLIYYTSNLAPGVPSRFSGSGSGNEYTLTISSLQPEDFATYYCQQFTSSPFTFGQGTKLEIKRTVAAPSVFIFPPSDEQLKSGTASVVCLLNNFYPREAKVQWKVDNALQSGNSQESVTEQDSKDSTYSLSSTLTLSKADYEKHKVYACEVTHQGLSSPVTKSFNRGEC

SEQ ID NO: 1899 - protein, 213 aa, synthetic construct
DNQLTQSPSFLSASVGDRVTITCRASSYVNYIYWYQQKPGKAPKLLIYYTSNLAPGVPSRFSGSGSGNEYTLTISSLQPEDFATYYCQQFTSSPFTFGQGTKLEIKRTVAAPSVFIFPPSDEQLKSGTASVVCLLNNFYPREAKVQWKVDNALQSGNSQESVTEQDSKDSTYSLSSTLTLSKADYEKHKVYACEVTHQGLSSPVTKSFNRGEC

SEQ ID NO: 1900 - protein, 213 aa, synthetic construct
DNQLTQSPSFLSASVGDRVTITCRASSSANYIYWYQQKPGKAPKLLIYYTSNLAPGVPSRFSGSGSGNEYTLTISSLQPEDFATYYCQQFTSSPFTFGQGTKLEIKRTVAAPSVFIFPPSDEQLKSGTASVVCLLNNFYPREAKVQWKVDNALQSGNSQESVTEQDSKDSTYSLSSTLTLSKADYEKHKVYACEVTHQGLSSPVTKSFNRGEC

SEQ ID NO: 1901 - protein, 213 aa, synthetic construct
DNQLTQSPSFLSASVGDRVTITCRASSSDNYIYWYQQKPGKAPKLLIYYTSNLAPGVPSRFSGSGSGNEYTLTISSLQPEDFATYYCQQFTSSPFTFGQGTKLEIKRTVAAPSVFIFPPSDEQLKSGTASVVCLLNNFYPREAKVQWKVDNALQSGNSQESVTEQDSKDSTYSLSSTLTLSKADYEKHKVYACEVTHQGLSSPVTKSFNRGEC

SEQ ID NO: 1902 - protein, 213 aa, synthetic construct
DNQLTQSPSFLSASVGDRVTITCRASSSENYIYWYQQKPGKAPKLLIYYTSNLAPGVPSRFSGSGSGNEYTLTISSLQPEDFATYYCQQFTSSPFTFGQGTKLEIKRTVAAPSVFIFPPSDEQLKSGTASVVCLLNNFYPREAKVQWKVDNALQSGNSQESVTEQDSKDSTYSLSSTLTLSKADYEKHKVYACEVTHQGLSSPVTKSFNRGEC

SEQ ID NO: 1903 - protein, 213 aa, synthetic construct
DNQLTQSPSFLSASVGDRVTITCRASSSFNYIYWYQQKPGKAPKLLIYYTSNLAPGVPSRFSGSGSGNEYTLTISSLQPEDFATYYCQQFTSSPFTFGQGTKLEIKRTVAAPSVFIFPPSDEQLKSGTASVVCLLNNFYPREAKVQWKVDNALQSGNSQESVTEQDSKDSTYSLSSTLTLSKADYEKHKVYACEVTHQGLSSPVTKSFNRGEC

SEQ ID NO: 1904 - protein, 213 aa, synthetic construct
DNQLTQSPSFLSASVGDRVTITCRASSSGNYIYWYQQKPGKAPKLLIYYTSNLAPGVPSRFSGSGSGNEYTLTISSLQPEDFATYYCQQFTSSPFTFGQGTKLEIKRTVAAPSVFIFPPSDEQLKSGTASVVCLLNNFYPREAKVQWKVDNALQSGNSQESVTEQDSKDSTYSLSSTLTLSKADYEKHKVYACEVTHQGLSSPVTKSFNRGEC

SEQ ID NO: 1905 - protein, 213 aa, synthetic construct
DNQLTQSPSFLSASVGDRVTITCRASSSHNYIYWYQQKPGKAPKLLIYYTSNLAPGVPSRFSGSGSGNEYTLTISSLQPEDFATYYCQQFTSSPFTFGQGTKLEIKRTVAAPSVFIFPPSDEQLKSGTASVVCLLNNFYPREAKVQWKVDNALQSGNSQESVTEQDSKDSTYSLSSTLTLSKADYEKHKVYACEVTHQGLSSPVTKSFNRGEC

SEQ ID NO: 1906 - protein, 213 aa, synthetic construct
DNQLTQSPSFLSASVGDRVTITCRASSSINYIYWYQQKPGKAPKLLIYYTSNLAPGVPSRFSGSGSGNEYTLTISSLQPEDFATYYCQQFTSSPFTFGQGTKLEIKRTVAAPSVFIFPPSDEQLKSGTASVVCLLNNFYPREAKVQWKVDNALQSGNSQESVTEQDSKDSTYSLSSTLTLSKADYEKHKVYACEVTHQGLSSPVTKSFNRGEC

SEQ ID NO: 1907 - protein, 213 aa, synthetic construct
DNQLTQSPSFLSASVGDRVTITCRASSSLNYIYWYQQKPGKAPKLLIYYTSNLAPGVPSRFSGSGSGNEYTLTISSLQPEDFATYYCQQFTSSPFTFGQGTKLEIKRTVAAPSVFIFPPSDEQLKSGTASVVCLLNNFYPREAKVQWKVDNALQSGNSQESVTEQDSKDSTYSLSSTLTLSKADYEKHKVYACEVTHQGLSSPVTKSFNRGEC

SEQ ID NO: 1908 - protein, 213 aa, synthetic construct
DNQLTQSPSFLSASVGDRVTITCRASSSMNYIYWYQQKPGKAPKLLIYYTSNLAPGVPSRFSGSGSGNEYTLTISSLQPEDFATYYCQQFTSSPFTFGQGTKLEIKRTVAAPSVFIFPPSDEQLKSGTASVVCLLNNFYPREAKVQWKVDNALQSGNSQESVTEQDSKDSTYSLSSTLTLSKADYEKHKVYACEVTHQGLSSPVTKSFNRGEC

SEQ ID NO: 1909 - protein, 213 aa, synthetic construct
DNQLTQSPSFLSASVGDRVTITCRASSSNNYIYWYQQKPGKAPKLLIYYTSNLAPGVPSRFSGSGSGNEYTLTISSLQPEDFATYYCQQFTSSPFTFGQGTKLEIKRTVAAPSVFIFPPSDEQLKSGTASVVCLLNNFYPREAKVQWKVDNALQSGNSQESVTEQDSKDSTYSLSSTLTLSKADYEKHKVYACEVTHQGLSSPVTKSFNRGEC

SEQ ID NO: 1910 - protein, 213 aa, synthetic construct
DNQLTQSPSFLSASVGDRVTITCRASSSPNYIYWYQQKPGKAPKLLIYYTSNLAPGVPSRFSGSGSGNEYTLTISSLQPEDFATYYCQQFTSSPFTFGQGTKLEIKRTVAAPSVFIFPPSDEQLKSGTASVVCLLNNFYPREAKVQWKVDNALQSGNSQESVTEQDSKDSTYSLSSTLTLSKADYEKHKVYACEVTHQGLSSPVTKSFNRGEC

SEQ ID NO: 1911 - protein, 213 aa, synthetic construct
DNQLTQSPSFLSASVGDRVTITCRASSSQNYIYWYQQKPGKAPKLLIYYTSNLAPGVPSRFSGSGSGNEYTLTISSLQPEDFATYYCQQFTSSPFTFGQGTKLEIKRTVAAPSVFIFPPSDEQLKSGTASVVCLLNNFYPREAKVQWKVDNALQSGNSQESVTEQDSKDSTYSLSSTLTLSKADYEKHKVYACEVTHQGLSSPVTKSFNRGEC

SEQ ID NO: 1912 - protein, 213 aa, synthetic construct
DNQLTQSPSFLSASVGDRVTITCRASSSRNYIYWYQQKPGKAPKLLIYYTSNLAPGVPSRFSGSGSGNEYTLTISSLQPEDFATYYCQQFTSSPFTFGQGTKLEIKRTVAAPSVFIFPPSDEQLKSGTASVVCLLNNFYPREAKVQWKVDNALQSGNSQESVTEQDSKDSTYSLSSTLTLSKADYEKHKVYACEVTHQGLSSPVTKSFNRGEC

SEQ ID NO: 1913 - protein, 213 aa, synthetic construct
DNQLTQSPSFLSASVGDRVTITCRASSSTNYIYWYQQKPGKAPKLLIYYTSNLAPGVPSRFSGSGSGNEYTLTISSLQPEDFATYYCQQFTSSPFTFGQGTKLEIKRTVAAPSVFIFPPSDEQLKSGTASVVCLLNNFYPREAKVQWKVDNALQSGNSQESVTEQDSKDSTYSLSSTLTLSKADYEKHKVYACEVTHQGLSSPVTKSFNRGEC

SEQ ID NO: 1914 - protein, 213 aa, synthetic construct
DNQLTQSPSFLSASVGDRVTITCRASSSWNYIYWYQQKPGKAPKLLIYYTSNLAPGVPSRFSGSGSGNEYTLTISSLQPEDFATYYCQQFTSSPFTFGQGTKLEIKRTVAAPSVFIFPPSDEQLKSGTASVVCLLNNFYPREAKVQWKVDNALQSGNSQESVTEQDSKDSTYSLSSTLTLSKADYEKHKVYACEVTHQGLSSPVTKSFNRGEC

SEQ ID NO: 1915 - protein, 213 aa, synthetic construct
DNQLTQSPSFLSASVGDRVTITCRASSSYNYIYWYQQKPGKAPKLLIYYTSNLAPGVPSRFSGSGSGNEYTLTISSLQPEDFATYYCQQFTSSPFTFGQGTKLEIKRTVAAPSVFIFPPSDEQLKSGTASVVCLLNNFYPREAKVQWKVDNALQSGNSQESVTEQDSKDSTYSLSSTLTLSKADYEKHKVYACEVTHQGLSSPVTKSFNRGEC

SEQ ID NO: 1916 - protein, 213 aa, synthetic construct
DNQLTQSPSFLSASVGDRVTITCRASSSVAYIYWYQQKPGKAPKLLIYYTSNLAPGVPSRFSGSGSGNEYTLTISSLQPEDFATYYCQQFTSSPFTFGQGTKLEIKRTVAAPSVFIFPPSDEQLKSGTASVVCLLNNFYPREAKVQWKVDNALQSGNSQESVTEQDSKDSTYSLSSTLTLSKADYEKHKVYACEVTHQGLSSPVTKSFNRGEC

SEQ ID NO: 1917 - protein, 213 aa, synthetic construct
DNQLTQSPSFLSASVGDRVTITCRASSSVDYIYWYQQKPGKAPKLLIYYTSNLAPGVPSRFSGSGSGNEYTLTISSLQPEDFATYYCQQFTSSPFTFGQGTKLEIKRTVAAPSVFIFPPSDEQLKSGTASVVCLLNNFYPREAKVQWKVDNALQSGNSQESVTEQDSKDSTYSLSSTLTLSKADYEKHKVYACEVTHQGLSSPVTKSFNRGEC

SEQ ID NO: 1918 - protein, 213 aa, synthetic construct
DNQLTQSPSFLSASVGDRVTITCRASSSVEYIYWYQQKPGKAPKLLIYYTSNLAPGVPSRFSGSGSGNEYTLTISSLQPEDFATYYCQQFTSSPFTFGQGTKLEIKRTVAAPSVFIFPPSDEQLKSGTASVVCLLNNFYPREAKVQWKVDNALQSGNSQESVTEQDSKDSTYSLSSTLTLSKADYEKHKVYACEVTHQGLSSPVTKSFNRGEC

SEQ ID NO: 1919 - protein, 213 aa, synthetic construct
DNQLTQSPSFLSASVGDRVTITCRASSSVFYIYWYQQKPGKAPKLLIYYTSNLAPGVPSRFSGSGSGNEYTLTISSLQPEDFATYYCQQFTSSPFTFGQGTKLEIKRTVAAPSVFIFPPSDEQLKSGTASVVCLLNNFYPREAKVQWKVDNALQSGNSQESVTEQDSKDSTYSLSSTLTLSKADYEKHKVYACEVTHQGLSSPVTKSFNRGEC

SEQ ID NO: 1920 - protein, 213 aa, synthetic construct
DNQLTQSPSFLSASVGDRVTITCRASSSVGYIYWYQQKPGKAPKLLIYYTSNLAPGVPSRFSGSGSGNEYTLTISSLQPEDFATYYCQQFTSSPFTFGQGTKLEIKRTVAAPSVFIFPPSDEQLKSGTASVVCLLNNFYPREAKVQWKVDNALQSGNSQESVTEQDSKDSTYSLSSTLTLSKADYEKHKVYACEVTHQGLSSPVTKSFNRGEC

SEQ ID NO: 1921 - protein, 213 aa, synthetic construct
DNQLTQSPSFLSASVGDRVTITCRASSSVHYIYWYQQKPGKAPKLLIYYTSNLAPGVPSRFSGSGSGNEYTLTISSLQPEDFATYYCQQFTSSPFTFGQGTKLEIKRTVAAPSVFIFPPSDEQLKSGTASVVCLLNNFYPREAKVQWKVDNALQSGNSQESVTEQDSKDSTYSLSSTLTLSKADYEKHKVYACEVTHQGLSSPVTKSFNRGEC

SEQ ID NO: 1922 - protein, 213 aa, synthetic construct
DNQLTQSPSFLSASVGDRVTITCRASSSVKYIYWYQQKPGKAPKLLIYYTSNLAPGVPSRFSGSGSGNEYTLTISSLQPEDFATYYCQQFTSSPFTFGQGTKLEIKRTVAAPSVFIFPPSDEQLKSGTASVVCLLNNFYPREAKVQWKVDNALQSGNSQESVTEQDSKDSTYSLSSTLTLSKADYEKHKVYACEVTHQGLSSPVTKSFNRGEC

SEQ ID NO: 1923 - protein, 213 aa, synthetic construct
DNQLTQSPSFLSASVGDRVTITCRASSSVLYIYWYQQKPGKAPKLLIYYTSNLAPGVPSRFSGSGSGNEYTLTISSLQPEDFATYYCQQFTSSPFTFGQGTKLEIKRTVAAPSVFIFPPSDEQLKSGTASVVCLLNNFYPREAKVQWKVDNALQSGNSQESVTEQDSKDSTYSLSSTLTLSKADYEKHKVYACEVTHQGLSSPVTKSFNRGEC

SEQ ID NO: 1924 - protein, 213 aa, synthetic construct
DNQLTQSPSFLSASVGDRVTITCRASSSVMYIYWYQQKPGKAPKLLIYYTSNLAPGVPSRFSGSGSGNEYTLTISSLQPEDFATYYCQQFTSSPFTFGQGTKLEIKRTVAAPSVFIFPPSDEQLKSGTASVVCLLNNFYPREAKVQWKVDNALQSGNSQESVTEQDSKDSTYSLSSTLTLSKADYEKHKVYACEVTHQGLSSPVTKSFNRGEC

SEQ ID NO: 1925 - protein, 213 aa, synthetic construct
DNQLTQSPSFLSASVGDRVTITCRASSSVPYIYWYQQKPGKAPKLLIYYTSNLAPGVPSRFSGSGSGNEYTLTISSLQPEDFATYYCQQFTSSPFTFGQGTKLEIKRTVAAPSVFIFPPSDEQLKSGTASVVCLLNNFYPREAKVQWKVDNALQSGNSQESVTEQDSKDSTYSLSSTLTLSKADYEKHKVYACEVTHQGLSSPVTKSFNRGEC

SEQ ID NO: 1926 - protein, 213 aa, synthetic construct
DNQLTQSPSFLSASVGDRVTITCRASSSVQYIYWYQQKPGKAPKLLIYYTSNLAPGVPSRFSGSGSGNEYTLTISSLQPEDFATYYCQQFTSSPFTFGQGTKLEIKRTVAAPSVFIFPPSDEQLKSGTASVVCLLNNFYPREAKVQWKVDNALQSGNSQESVTEQDSKDSTYSLSSTLTLSKADYEKHKVYACEVTHQGLSSPVTKSFNRGEC

SEQ ID NO: 1927 - protein, 213 aa, synthetic construct
DNQLTQSPSFLSASVGDRVTITCRASSSVRYIYWYQQKPGKAPKLLIYYTSNLAPGVPSRFSGSGSGNEYTLTISSLQPEDFATYYCQQFTSSPFTFGQGTKLEIKRTVAAPSVFIFPPSDEQLKSGTASVVCLLNNFYPREAKVQWKVDNALQSGNSQESVTEQDSKDSTYSLSSTLTLSKADYEKHKVYACEVTHQGLSSPVTKSFNRGEC

SEQ ID NO: 1928 - protein, 213 aa, synthetic construct
DNQLTQSPSFLSASVGDRVTITCRASSSVSYIYWYQQKPGKAPKLLIYYTSNLAPGVPSRFSGSGSGNEYTLTISSLQPEDFATYYCQQFTSSPFTFGQGTKLEIKRTVAAPSVFIFPPSDEQLKSGTASVVCLLNNFYPREAKVQWKVDNALQSGNSQESVTEQDSKDSTYSLSSTLTLSKADYEKHKVYACEVTHQGLSSPVTKSFNRGEC

SEQ ID NO: 1929 - protein, 213 aa, synthetic construct
DNQLTQSPSFLSASVGDRVTITCRASSSVTYIYWYQQKPGKAPKLLIYYTSNLAPGVPSRFSGSGSGNEYTLTISSLQPEDFATYYCQQFTSSPFTFGQGTKLEIKRTVAAPSVFIFPPSDEQLKSGTASVVCLLNNFYPREAKVQWKVDNALQSGNSQESVTEQDSKDSTYSLSSTLTLSKADYEKHKVYACEVTHQGLSSPVTKSFNRGEC

SEQ ID NO: 1930 - protein, 213 aa, synthetic construct
DNQLTQSPSFLSASVGDRVTITCRASSSVVYIYWYQQKPGKAPKLLIYYTSNLAPGVPSRFSGSGSGNEYTLTISSLQPEDFATYYCQQFTSSPFTFGQGTKLEIKRTVAAPSVFIFPPSDEQLKSGTASVVCLLNNFYPREAKVQWKVDNALQSGNSQESVTEQDSKDSTYSLSSTLTLSKADYEKHKVYACEVTHQGLSSPVTKSFNRGEC

SEQ ID NO: 1931 - protein, 213 aa, synthetic construct
DNQLTQSPSFLSASVGDRVTITCRASSSVWYIYWYQQKPGKAPKLLIYYTSNLAPGVPSRFSGSGSGNEYTLTISSLQPEDFATYYCQQFTSSPFTFGQGTKLEIKRTVAAPSVFIFPPSDEQLKSGTASVVCLLNNFYPREAKVQWKVDNALQSGNSQESVTEQDSKDSTYSLSSTLTLSKADYEKHKVYACEVTHQGLSSPVTKSFNRGEC

SEQ ID NO: 1932 - protein, 213 aa, synthetic construct
DNQLTQSPSFLSASVGDRVTITCRASSSVYYIYWYQQKPGKAPKLLIYYTSNLAPGVPSRFSGSGSGNEYTLTISSLQPEDFATYYCQQFTSSPFTFGQGTKLEIKRTVAAPSVFIFPPSDEQLKSGTASVVCLLNNFYPREAKVQWKVDNALQSGNSQESVTEQDSKDSTYSLSSTLTLSKADYEKHKVYACEVTHQGLSSPVTKSFNRGEC

SEQ ID NO: 1933 - protein, 213 aa, synthetic construct
DNQLTQSPSFLSASVGDRVTITCRASSSVNAIYWYQQKPGKAPKLLIYYTSNLAPGVPSRFSGSGSGNEYTLTISSLQPEDFATYYCQQFTSSPFTFGQGTKLEIKRTVAAPSVFIFPPSDEQLKSGTASVVCLLNNFYPREAKVQWKVDNALQSGNSQESVTEQDSKDSTYSLSSTLTLSKADYEKHKVYACEVTHQGLSSPVTKSFNRGEC

SEQ ID NO: 1934 - protein, 213 aa, synthetic construct
DNQLTQSPSFLSASVGDRVTITCRASSSVNDIYWYQQKPGKAPKLLIYYTSNLAPGVPSRFSGSGSGNEYTLTISSLQPEDFATYYCQQFTSSPFTFGQGTKLEIKRTVAAPSVFIFPPSDEQLKSGTASVVCLLNNFYPREAKVQWKVDNALQSGNSQESVTEQDSKDSTYSLSSTLTLSKADYEKHKVYACEVTHQGLSSPVTKSFNRGEC

SEQ ID NO: 1935 - protein, 213 aa, synthetic construct
DNQLTQSPSFLSASVGDRVTITCRASSSVNEIYWYQQKPGKAPKLLIYYTSNLAPGVPSRFSGSGSGNEYTLTISSLQPEDFATYYCQQFTSSPFTFGQGTKLEIKRTVAAPSVFIFPPSDEQLKSGTASVVCLLNNFYPREAKVQWKVDNALQSGNSQESVTEQDSKDSTYSLSSTLTLSKADYEKHKVYACEVTHQGLSSPVTKSFNRGEC

SEQ ID NO: 1936 - protein, 213 aa, synthetic construct
DNQLTQSPSFLSASVGDRVTITCRASSSVNFIYWYQQKPGKAPKLLIYYTSNLAPGVPSRFSGSGSGNEYTLTISSLQPEDFATYYCQQFTSSPFTFGQGTKLEIKRTVAAPSVFIFPPSDEQLKSGTASVVCLLNNFYPREAKVQWKVDNALQSGNSQESVTEQDSKDSTYSLSSTLTLSKADYEKHKVYACEVTHQGLSSPVTKSFNRGEC

SEQ ID NO: 1937 - protein, 213 aa, synthetic construct
DNQLTQSPSFLSASVGDRVTITCRASSSVNGIYWYQQKPGKAPKLLIYYTSNLAPGVPSRFSGSGSGNEYTLTISSLQPEDFATYYCQQFTSSPFTFGQGTKLEIKRTVAAPSVFIFPPSDEQLKSGTASVVCLLNNFYPREAKVQWKVDNALQSGNSQESVTEQDSKDSTYSLSSTLTLSKADYEKHKVYACEVTHQGLSSPVTKSFNRGEC

SEQ ID NO: 1938 - protein, 213 aa, synthetic construct
DNQLTQSPSFLSASVGDRVTITCRASSSVNHIYWYQQKPGKAPKLLIYYTSNLAPGVPSRFSGSGSGNEYTLTISSLQPEDFATYYCQQFTSSPFTFGQGTKLEIKRTVAAPSVFIFPPSDEQLKSGTASVVCLLNNFYPREAKVQWKVDNALQSGNSQESVTEQDSKDSTYSLSSTLTLSKADYEKHKVYACEVTHQGLSSPVTKSFNRGEC

SEQ ID NO: 1939 - protein, 213 aa, synthetic construct
DNQLTQSPSFLSASVGDRVTITCRASSSVNIIYWYQQKPGKAPKLLIYYTSNLAPGVPSRFSGSGSGNEYTLTISSLQPEDFATYYCQQFTSSPFTFGQGTKLEIKRTVAAPSVFIFPPSDEQLKSGTASVVCLLNNFYPREAKVQWKVDNALQSGNSQESVTEQDSKDSTYSLSSTLTLSKADYEKHKVYACEVTHQGLSSPVTKSFNRGEC

SEQ ID NO: 1940 - protein, 213 aa, synthetic construct
DNQLTQSPSFLSASVGDRVTITCRASSSVNKIYWYQQKPGKAPKLLIYYTSNLAPGVPSRFSGSGSGNEYTLTISSLQPEDFATYYCQQFTSSPFTFGQGTKLEIKRTVAAPSVFIFPPSDEQLKSGTASVVCLLNNFYPREAKVQWKVDNALQSGNSQESVTEQDSKDSTYSLSSTLTLSKADYEKHKVYACEVTHQGLSSPVTKSFNRGEC

SEQ ID NO: 1941 - protein, 213 aa, synthetic construct
DNQLTQSPSFLSASVGDRVTITCRASSSVNLIYWYQQKPGKAPKLLIYYTSNLAPGVPSRFSGSGSGNEYTLTISSLQPEDFATYYCQQFTSSPFTFGQGTKLEIKRTVAAPSVFIFPPSDEQLKSGTASVVCLLNNFYPREAKVQWKVDNALQSGNSQESVTEQDSKDSTYSLSSTLTLSKADYEKHKVYACEVTHQGLSSPVTKSFNRGEC

SEQ ID NO: 1942 - protein, 213 aa, synthetic construct
DNQLTQSPSFLSASVGDRVTITCRASSSVNMIYWYQQKPGKAPKLLIYYTSNLAPGVPSRFSGSGSGNEYTLTISSLQPEDFATYYCQQFTSSPFTFGQGTKLEIKRTVAAPSVFIFPPSDEQLKSGTASVVCLLNNFYPREAKVQWKVDNALQSGNSQESVTEQDSKDSTYSLSSTLTLSKADYEKHKVYACEVTHQGLSSPVTKSFNRGEC

SEQ ID NO: 1943 - protein, 213 aa, synthetic construct
DNQLTQSPSFLSASVGDRVTITCRASSSVNNIYWYQQKPGKAPKLLIYYTSNLAPGVPSRFSGSGSGNEYTLTISSLQPEDFATYYCQQFTSSPFTFGQGTKLEIKRTVAAPSVFIFPPSDEQLKSGTASVVCLLNNFYPREAKVQWKVDNALQSGNSQESVTEQDSKDSTYSLSSTLTLSKADYEKHKVYACEVTHQGLSSPVTKSFNRGEC

SEQ ID NO: 1944 - protein, 213 aa, synthetic construct
DNQLTQSPSFLSASVGDRVTITCRASSSVNPIYWYQQKPGKAPKLLIYYTSNLAPGVPSRFSGSGSGNEYTLTISSLQPEDFATYYCQQFTSSPFTFGQGTKLEIKRTVAAPSVFIFPPSDEQLKSGTASVVCLLNNFYPREAKVQWKVDNALQSGNSQESVTEQDSKDSTYSLSSTLTLSKADYEKHKVYACEVTHQGLSSPVTKSFNRGEC

SEQ ID NO: 1945 - protein, 213 aa, synthetic construct
DNQLTQSPSFLSASVGDRVTITCRASSSVNQIYWYQQKPGKAPKLLIYYTSNLAPGVPSRFSGSGSGNEYTLTISSLQPEDFATYYCQQFTSSPFTFGQGTKLEIKRTVAAPSVFIFPPSDEQLKSGTASVVCLLNNFYPREAKVQWKVDNALQSGNSQESVTEQDSKDSTYSLSSTLTLSKADYEKHKVYACEVTHQGLSSPVTKSFNRGEC

SEQ ID NO: 1946 - protein, 213 aa, synthetic construct
DNQLTQSPSFLSASVGDRVTITCRASSSVNRIYWYQQKPGKAPKLLIYYTSNLAPGVPSRFSGSGSGNEYTLTISSLQPEDFATYYCQQFTSSPFTFGQGTKLEIKRTVAAPSVFIFPPSDEQLKSGTASVVCLLNNFYPREAKVQWKVDNALQSGNSQESVTEQDSKDSTYSLSSTLTLSKADYEKHKVYACEVTHQGLSSPVTKSFNRGEC

SEQ ID NO: 1947 - protein, 213 aa, synthetic construct
DNQLTQSPSFLSASVGDRVTITCRASSSVNTIYWYQQKPGKAPKLLIYYTSNLAPGVPSRFSGSGSGNEYTLTISSLQPEDFATYYCQQFTSSPFTFGQGTKLEIKRTVAAPSVFIFPPSDEQLKSGTASVVCLLNNFYPREAKVQWKVDNALQSGNSQESVTEQDSKDSTYSLSSTLTLSKADYEKHKVYACEVTHQGLSSPVTKSFNRGEC

SEQ ID NO: 1948 - protein, 213 aa, synthetic construct
DNQLTQSPSFLSASVGDRVTITCRASSSVNVIYWYQQKPGKAPKLLIYYTSNLAPGVPSRFSGSGSGNEYTLTISSLQPEDFATYYCQQFTSSPFTFGQGTKLEIKRTVAAPSVFIFPPSDEQLKSGTASVVCLLNNFYPREAKVQWKVDNALQSGNSQESVTEQDSKDSTYSLSSTLTLSKADYEKHKVYACEVTHQGLSSPVTKSFNRGEC

SEQ ID NO: 1949 - protein, 213 aa, synthetic construct
DNQLTQSPSFLSASVGDRVTITCRASSSVNYDYWYQQKPGKAPKLLIYYTSNLAPGVPSRFSGSGSGNEYTLTISSLQPEDFATYYCQQFTSSPFTFGQGTKLEIKRTVAAPSVFIFPPSDEQLKSGTASVVCLLNNFYPREAKVQWKVDNALQSGNSQESVTEQDSKDSTYSLSSTLTLSKADYEKHKVYACEVTHQGLSSPVTKSFNRGEC

SEQ ID NO: 1950 - protein, 213 aa, synthetic construct
DNQLTQSPSFLSASVGDRVTITCRASSSVNYFYWYQQKPGKAPKLLIYYTSNLAPGVPSRFSGSGSGNEYTLTISSLQPEDFATYYCQQFTSSPFTFGQGTKLEIKRTVAAPSVFIFPPSDEQLKSGTASVVCLLNNFYPREAKVQWKVDNALQSGNSQESVTEQDSKDSTYSLSSTLTLSKADYEKHKVYACEVTHQGLSSPVTKSFNRGEC

SEQ ID NO: 1951 - protein, 213 aa, synthetic construct
DNQLTQSPSFLSASVGDRVTITCRASSSVNYHYWYQQKPGKAPKLLIYYTSNLAPGVPSRFSGSGSGNEYTLTISSLQPEDFATYYCQQFTSSPFTFGQGTKLEIKRTVAAPSVFIFPPSDEQLKSGTASVVCLLNNFYPREAKVQWKVDNALQSGNSQESVTEQDSKDSTYSLSSTLTLSKADYEKHKVYACEVTHQGLSSPVTKSFNRGEC

SEQ ID NO: 1952 - protein, 213 aa, synthetic construct
DNQLTQSPSFLSASVGDRVTITCRASSSVNYKYWYQQKPGKAPKLLIYYTSNLAPGVPSRFSGSGSGNEYTLTISSLQPEDFATYYCQQFTSSPFTFGQGTKLEIKRTVAAPSVFIFPPSDEQLKSGTASVVCLLNNFYPREAKVQWKVDNALQSGNSQESVTEQDSKDSTYSLSSTLTLSKADYEKHKVYACEVTHQGLSSPVTKSFNRGEC

SEQ ID NO: 1953 - protein, 213 aa, synthetic construct
DNQLTQSPSFLSASVGDRVTITCRASSSVNYLYWYQQKPGKAPKLLIYYTSNLAPGVPSRFSGSGSGNEYTLTISSLQPEDFATYYCQQFTSSPFTFGQGTKLEIKRTVAAPSVFIFPPSDEQLKSGTASVVCLLNNFYPREAKVQWKVDNALQSGNSQESVTEQDSKDSTYSLSSTLTLSKADYEKHKVYACEVTHQGLSSPVTKSFNRGEC

SEQ ID NO: 1954 - protein, 213 aa, synthetic construct
DNQLTQSPSFLSASVGDRVTITCRASSSVNYMYWYQQKPGKAPKLLIYYTSNLAPGVPSRFSGSGSGNEYTLTISSLQPEDFATYYCQQFTSSPFTFGQGTKLEIKRTVAAPSVFIFPPSDEQLKSGTASVVCLLNNFYPREAKVQWKVDNALQSGNSQESVTEQDSKDSTYSLSSTLTLSKADYEKHKVYACEVTHQGLSSPVTKSFNRGEC

SEQ ID NO: 1955 - protein, 213 aa, synthetic construct
DNQLTQSPSFLSASVGDRVTITCRASSSVNYNYWYQQKPGKAPKLLIYYTSNLAPGVPSRFSGSGSGNEYTLTISSLQPEDFATYYCQQFTSSPFTFGQGTKLEIKRTVAAPSVFIFPPSDEQLKSGTASVVCLLNNFYPREAKVQWKVDNALQSGNSQESVTEQDSKDSTYSLSSTLTLSKADYEKHKVYACEVTHQGLSSPVTKSFNRGEC

SEQ ID NO: 1956 - protein, 213 aa, synthetic construct
DNQLTQSPSFLSASVGDRVTITCRASSSVNYPYWYQQKPGKAPKLLIYYTSNLAPGVPSRFSGSGSGNEYTLTISSLQPEDFATYYCQQFTSSPFTFGQGTKLEIKRTVAAPSVFIFPPSDEQLKSGTASVVCLLNNFYPREAKVQWKVDNALQSGNSQESVTEQDSKDSTYSLSSTLTLSKADYEKHKVYACEVTHQGLSSPVTKSFNRGEC

SEQ ID NO: 1957 - protein, 213 aa, synthetic construct
DNQLTQSPSFLSASVGDRVTITCRASSSVNYQYWYQQKPGKAPKLLIYYTSNLAPGVPSRFSGSGSGNEYTLTISSLQPEDFATYYCQQFTSSPFTFGQGTKLEIKRTVAAPSVFIFPPSDEQLKSGTASVVCLLNNFYPREAKVQWKVDNALQSGNSQESVTEQDSKDSTYSLSSTLTLSKADYEKHKVYACEVTHQGLSSPVTKSFNRGEC

SEQ ID NO: 1958 - protein, 213 aa, synthetic construct
DNQLTQSPSFLSASVGDRVTITCRASSSVNYRYWYQQKPGKAPKLLIYYTSNLAPGVPSRFSGSGSGNEYTLTISSLQPEDFATYYCQQFTSSPFTFGQGTKLEIKRTVAAPSVFIFPPSDEQLKSGTASVVCLLNNFYPREAKVQWKVDNALQSGNSQESVTEQDSKDSTYSLSSTLTLSKADYEKHKVYACEVTHQGLSSPVTKSFNRGEC

SEQ ID NO: 1959 - protein, 213 aa, synthetic construct
DNQLTQSPSFLSASVGDRVTITCRASSSVNYSYWYQQKPGKAPKLLIYYTSNLAPGVPSRFSGSGSGNEYTLTISSLQPEDFATYYCQQFTSSPFTFGQGTKLEIKRTVAAPSVFIFPPSDEQLKSGTASVVCLLNNFYPREAKVQWKVDNALQSGNSQESVTEQDSKDSTYSLSSTLTLSKADYEKHKVYACEVTHQGLSSPVTKSFNRGEC

SEQ ID NO: 1960 - protein, 213 aa, synthetic construct
DNQLTQSPSFLSASVGDRVTITCRASSSVNYTYWYQQKPGKAPKLLIYYTSNLAPGVPSRFSGSGSGNEYTLTISSLQPEDFATYYCQQFTSSPFTFGQGTKLEIKRTVAAPSVFIFPPSDEQLKSGTASVVCLLNNFYPREAKVQWKVDNALQSGNSQESVTEQDSKDSTYSLSSTLTLSKADYEKHKVYACEVTHQGLSSPVTKSFNRGEC

SEQ ID NO: 1961 - protein, 213 aa, synthetic construct
DNQLTQSPSFLSASVGDRVTITCRASSSVNYWYWYQQKPGKAPKLLIYYTSNLAPGVPSRFSGSGSGNEYTLTISSLQPEDFATYYCQQFTSSPFTFGQGTKLEIKRTVAAPSVFIFPPSDEQLKSGTASVVCLLNNFYPREAKVQWKVDNALQSGNSQESVTEQDSKDSTYSLSSTLTLSKADYEKHKVYACEVTHQGLSSPVTKSFNRGEC

SEQ ID NO: 1962 - protein, 213 aa, synthetic construct
DNQLTQSPSFLSASVGDRVTITCRASSSVNYYYWYQQKPGKAPKLLIYYTSNLAPGVPSRFSGSGSGNEYTLTISSLQPEDFATYYCQQFTSSPFTFGQGTKLEIKRTVAAPSVFIFPPSDEQLKSGTASVVCLLNNFYPREAKVQWKVDNALQSGNSQESVTEQDSKDSTYSLSSTLTLSKADYEKHKVYACEVTHQGLSSPVTKSFNRGEC

SEQ ID NO: 1963 - protein, 213 aa, synthetic construct
DNQLTQSPSFLSASVGDRVTITCRASSSVNYIAWYQQKPGKAPKLLIYYTSNLAPGVPSRFSGSGSGNEYTLTISSLQPEDFATYYCQQFTSSPFTFGQGTKLEIKRTVAAPSVFIFPPSDEQLKSGTASVVCLLNNFYPREAKVQWKVDNALQSGNSQESVTEQDSKDSTYSLSSTLTLSKADYEKHKVYACEVTHQGLSSPVTKSFNRGEC

SEQ ID NO: 1964 - protein, 213 aa, synthetic construct
DNQLTQSPSFLSASVGDRVTITCRASSSVNYIDWYQQKPGKAPKLLIYYTSNLAPGVPSRFSGSGSGNEYTLTISSLQPEDFATYYCQQFTSSPFTFGQGTKLEIKRTVAAPSVFIFPPSDEQLKSGTASVVCLLNNFYPREAKVQWKVDNALQSGNSQESVTEQDSKDSTYSLSSTLTLSKADYEKHKVYACEVTHQGLSSPVTKSFNRGEC

SEQ ID NO: 1965 - protein, 213 aa, synthetic construct
DNQLTQSPSFLSASVGDRVTITCRASSSVNYIFWYQQKPGKAPKLLIYYTSNLAPGVPSRFSGSGSGNEYTLTISSLQPEDFATYYCQQFTSSPFTFGQGTKLEIKRTVAAPSVFIFPPSDEQLKSGTASVVCLLNNFYPREAKVQWKVDNALQSGNSQESVTEQDSKDSTYSLSSTLTLSKADYEKHKVYACEVTHQGLSSPVTKSFNRGEC

SEQ ID NO: 1966 - protein, 213 aa, synthetic construct
DNQLTQSPSFLSASVGDRVTITCRASSSVNYIGWYQQKPGKAPKLLIYYTSNLAPGVPSRFSGSGSGNEYTLTISSLQPEDFATYYCQQFTSSPFTFGQGTKLEIKRTVAAPSVFIFPPSDEQLKSGTASVVCLLNNFYPREAKVQWKVDNALQSGNSQESVTEQDSKDSTYSLSSTLTLSKADYEKHKVYACEVTHQGLSSPVTKSFNRGEC

SEQ ID NO: 1967 - protein, 213 aa, synthetic construct
DNQLTQSPSFLSASVGDRVTITCRASSSVNYIHWYQQKPGKAPKLLIYYTSNLAPGVPSRFSGSGSGNEYTLTISSLQPEDFATYYCQQFTSSPFTFGQGTKLEIKRTVAAPSVFIFPPSDEQLKSGTASVVCLLNNFYPREAKVQWKVDNALQSGNSQESVTEQDSKDSTYSLSSTLTLSKADYEKHKVYACEVTHQGLSSPVTKSFNRGEC

SEQ ID NO: 1968 - protein, 213 aa, synthetic construct
DNQLTQSPSFLSASVGDRVTITCRASSSVNYIIWYQQKPGKAPKLLIYYTSNLAPGVPSRFSGSGSGNEYTLTISSLQPEDFATYYCQQFTSSPFTFGQGTKLEIKRTVAAPSVFIFPPSDEQLKSGTASVVCLLNNFYPREAKVQWKVDNALQSGNSQESVTEQDSKDSTYSLSSTLTLSKADYEKHKVYACEVTHQGLSSPVTKSFNRGEC

SEQ ID NO: 1969 - protein, 213 aa, synthetic construct
DNQLTQSPSFLSASVGDRVTITCRASSSVNYILWYQQKPGKAPKLLIYYTSNLAPGVPSRFSGSGSGNEYTLTISSLQPEDFATYYCQQFTSSPFTFGQGTKLEIKRTVAAPSVFIFPPSDEQLKSGTASVVCLLNNFYPREAKVQWKVDNALQSGNSQESVTEQDSKDSTYSLSSTLTLSKADYEKHKVYACEVTHQGLSSPVTKSFNRGEC

SEQ ID NO: 1970 - protein, 213 aa, synthetic construct
DNQLTQSPSFLSASVGDRVTITCRASSSVNYINWYQQKPGKAPKLLIYYTSNLAPGVPSRFSGSGSGNEYTLTISSLQPEDFATYYCQQFTSSPFTFGQGTKLEIKRTVAAPSVFIFPPSDEQLKSGTASVVCLLNNFYPREAKVQWKVDNALQSGNSQESVTEQDSKDSTYSLSSTLTLSKADYEKHKVYACEVTHQGLSSPVTKSFNRGEC

SEQ ID NO: 1971 - protein, 213 aa, synthetic construct
DNQLTQSPSFLSASVGDRVTITCRASSSVNYIPWYQQKPGKAPKLLIYYTSNLAPGVPSRFSGSGSGNEYTLTISSLQPEDFATYYCQQFTSSPFTFGQGTKLEIKRTVAAPSVFIFPPSDEQLKSGTASVVCLLNNFYPREAKVQWKVDNALQSGNSQESVTEQDSKDSTYSLSSTLTLSKADYEKHKVYACEVTHQGLSSPVTKSFNRGEC

SEQ ID NO: 1972 - protein, 213 aa, synthetic construct
DNQLTQSPSFLSASVGDRVTITCRASSSVNYIRWYQQKPGKAPKLLIYYTSNLAPGVPSRFSGSGSGNEYTLTISSLQPEDFATYYCQQFTSSPFTFGQGTKLEIKRTVAAPSVFIFPPSDEQLKSGTASVVCLLNNFYPREAKVQWKVDNALQSGNSQESVTEQDSKDSTYSLSSTLTLSKADYEKHKVYACEVTHQGLSSPVTKSFNRGEC

SEQ ID NO: 1973 - protein, 213 aa, synthetic construct
DNQLTQSPSFLSASVGDRVTITCRASSSVNYISWYQQKPGKAPKLLIYYTSNLAPGVPSRFSGSGSGNEYTLTISSLQPEDFATYYCQQFTSSPFTFGQGTKLEIKRTVAAPSVFIFPPSDEQLKSGTASVVCLLNNFYPREAKVQWKVDNALQSGNSQESVTEQDSKDSTYSLSSTLTLSKADYEKHKVYACEVTHQGLSSPVTKSFNRGEC

SEQ ID NO: 1974 - protein, 213 aa, synthetic construct
DNQLTQSPSFLSASVGDRVTITCRASSSVNYITWYQQKPGKAPKLLIYYTSNLAPGVPSRFSGSGSGNEYTLTISSLQPEDFATYYCQQFTSSPFTFGQGTKLEIKRTVAAPSVFIFPPSDEQLKSGTASVVCLLNNFYPREAKVQWKVDNALQSGNSQESVTEQDSKDSTYSLSSTLTLSKADYEKHKVYACEVTHQGLSSPVTKSFNRGEC

SEQ ID NO: 1975 - protein, 213 aa, synthetic construct
DNQLTQSPSFLSASVGDRVTITCRASSSVNYIVWYQQKPGKAPKLLIYYTSNLAPGVPSRFSGSGSGNEYTLTISSLQPEDFATYYCQQFTSSPFTFGQGTKLEIKRTVAAPSVFIFPPSDEQLKSGTASVVCLLNNFYPREAKVQWKVDNALQSGNSQESVTEQDSKDSTYSLSSTLTLSKADYEKHKVYACEVTHQGLSSPVTKSFNRGEC

SEQ ID NO: 1976 - protein, 213 aa, synthetic construct
DNQLTQSPSFLSASVGDRVTITCRASSSVNYIWWYQQKPGKAPKLLIYYTSNLAPGVPSRFSGSGSGNEYTLTISSLQPEDFATYYCQQFTSSPFTFGQGTKLEIKRTVAAPSVFIFPPSDEQLKSGTASVVCLLNNFYPREAKVQWKVDNALQSGNSQESVTEQDSKDSTYSLSSTLTLSKADYEKHKVYACEVTHQGLSSPVTKSFNRGEC

SEQ ID NO: 1977 - protein, 213 aa, synthetic construct
DNQLTQSPSFLSASVGDRVTITCRASSSVNYIYWYQQKPGKAPKLLIYATSNLAPGVPSRFSGSGSGNEYTLTISSLQPEDFATYYCQQFTSSPFTFGQGTKLEIKRTVAAPSVFIFPPSDEQLKSGTASVVCLLNNFYPREAKVQWKVDNALQSGNSQESVTEQDSKDSTYSLSSTLTLSKADYEKHKVYACEVTHQGLSSPVTKSFNRGEC

SEQ ID NO: 1978 - protein, 213 aa, synthetic construct
DNQLTQSPSFLSASVGDRVTITCRASSSVNYIYWYQQKPGKAPKLLIYDTSNLAPGVPSRFSGSGSGNEYTLTISSLQPEDFATYYCQQFTSSPFTFGQGTKLEIKRTVAAPSVFIFPPSDEQLKSGTASVVCLLNNFYPREAKVQWKVDNALQSGNSQESVTEQDSKDSTYSLSSTLTLSKADYEKHKVYACEVTHQGLSSPVTKSFNRGEC

SEQ ID NO: 1979 - protein, 213 aa, synthetic construct
DNQLTQSPSFLSASVGDRVTITCRASSSVNYIYWYQQKPGKAPKLLIYETSNLAPGVPSRFSGSGSGNEYTLTISSLQPEDFATYYCQQFTSSPFTFGQGTKLEIKRTVAAPSVFIFPPSDEQLKSGTASVVCLLNNFYPREAKVQWKVDNALQSGNSQESVTEQDSKDSTYSLSSTLTLSKADYEKHKVYACEVTHQGLSSPVTKSFNRGEC

SEQ ID NO: 1980 - protein, 213 aa, synthetic construct
DNQLTQSPSFLSASVGDRVTITCRASSSVNYIYWYQQKPGKAPKLLIYFTSNLAPGVPSRFSGSGSGNEYTLTISSLQPEDFATYYCQQFTSSPFTFGQGTKLEIKRTVAAPSVFIFPPSDEQLKSGTASVVCLLNNFYPREAKVQWKVDNALQSGNSQESVTEQDSKDSTYSLSSTLTLSKADYEKHKVYACEVTHQGLSSPVTKSFNRGEC

SEQ ID NO: 1981 - protein, 213 aa, synthetic construct
DNQLTQSPSFLSASVGDRVTITCRASSSVNYIYWYQQKPGKAPKLLIYGTSNLAPGVPSRFSGSGSGNEYTLTISSLQPEDFATYYCQQFTSSPFTFGQGTKLEIKRTVAAPSVFIFPPSDEQLKSGTASVVCLLNNFYPREAKVQWKVDNALQSGNSQESVTEQDSKDSTYSLSSTLTLSKADYEKHKVYACEVTHQGLSSPVTKSFNRGEC

SEQ ID NO: 1982 - protein, 213 aa, synthetic construct
DNQLTQSPSFLSASVGDRVTITCRASSSVNYIYWYQQKPGKAPKLLIYHTSNLAPGVPSRFSGSGSGNEYTLTISSLQPEDFATYYCQQFTSSPFTFGQGTKLEIKRTVAAPSVFIFPPSDEQLKSGTASVVCLLNNFYPREAKVQWKVDNALQSGNSQESVTEQDSKDSTYSLSSTLTLSKADYEKHKVYACEVTHQGLSSPVTKSFNRGEC

SEQ ID NO: 1983 - protein, 213 aa, synthetic construct
DNQLTQSPSFLSASVGDRVTITCRASSSVNYIYWYQQKPGKAPKLLIYITSNLAPGVPSRFSGSGSGNEYTLTISSLQPEDFATYYCQQFTSSPFTFGQGTKLEIKRTVAAPSVFIFPPSDEQLKSGTASVVCLLNNFYPREAKVQWKVDNALQSGNSQESVTEQDSKDSTYSLSSTLTLSKADYEKHKVYACEVTHQGLSSPVTKSFNRGEC

SEQ ID NO: 1984 - protein, 213 aa, synthetic construct
DNQLTQSPSFLSASVGDRVTITCRASSSVNYIYWYQQKPGKAPKLLIYKTSNLAPGVPSRFSGSGSGNEYTLTISSLQPEDFATYYCQQFTSSPFTFGQGTKLEIKRTVAAPSVFIFPPSDEQLKSGTASVVCLLNNFYPREAKVQWKVDNALQSGNSQESVTEQDSKDSTYSLSSTLTLSKADYEKHKVYACEVTHQGLSSPVTKSFNRGEC

SEQ ID NO: 1985 - protein, 213 aa, synthetic construct
DNQLTQSPSFLSASVGDRVTITCRASSSVNYIYWYQQKPGKAPKLLIYLTSNLAPGVPSRFSGSGSGNEYTLTISSLQPEDFATYYCQQFTSSPFTFGQGTKLEIKRTVAAPSVFIFPPSDEQLKSGTASVVCLLNNFYPREAKVQWKVDNALQSGNSQESVTEQDSKDSTYSLSSTLTLSKADYEKHKVYACEVTHQGLSSPVTKSFNRGEC

SEQ ID NO: 1986 - protein, 213 aa, synthetic construct
DNQLTQSPSFLSASVGDRVTITCRASSSVNYIYWYQQKPGKAPKLLIYMTSNLAPGVPSRFSGSGSGNEYTLTISSLQPEDFATYYCQQFTSSPFTFGQGTKLEIKRTVAAPSVFIFPPSDEQLKSGTASVVCLLNNFYPREAKVQWKVDNALQSGNSQESVTEQDSKDSTYSLSSTLTLSKADYEKHKVYACEVTHQGLSSPVTKSFNRGEC

SEQ ID NO: 1987 - protein, 213 aa, synthetic construct
DNQLTQSPSFLSASVGDRVTITCRASSSVNYIYWYQQKPGKAPKLLIYNTSNLAPGVPSRFSGSGSGNEYTLTISSLQPEDFATYYCQQFTSSPFTFGQGTKLEIKRTVAAPSVFIFPPSDEQLKSGTASVVCLLNNFYPREAKVQWKVDNALQSGNSQESVTEQDSKDSTYSLSSTLTLSKADYEKHKVYACEVTHQGLSSPVTKSFNRGEC

SEQ ID NO: 1988 - protein, 213 aa, synthetic construct
DNQLTQSPSFLSASVGDRVTITCRASSSVNYIYWYQQKPGKAPKLLIYPTSNLAPGVPSRFSGSGSGNEYTLTISSLQPEDFATYYCQQFTSSPFTFGQGTKLEIKRTVAAPSVFIFPPSDEQLKSGTASVVCLLNNFYPREAKVQWKVDNALQSGNSQESVTEQDSKDSTYSLSSTLTLSKADYEKHKVYACEVTHQGLSSPVTKSFNRGEC

SEQ ID NO: 1989 - protein, 213 aa, synthetic construct
DNQLTQSPSFLSASVGDRVTITCRASSSVNYIYWYQQKPGKAPKLLIYQTSNLAPGVPSRFSGSGSGNEYTLTISSLQPEDFATYYCQQFTSSPFTFGQGTKLEIKRTVAAPSVFIFPPSDEQLKSGTASVVCLLNNFYPREAKVQWKVDNALQSGNSQESVTEQDSKDSTYSLSSTLTLSKADYEKHKVYACEVTHQGLSSPVTKSFNRGEC

SEQ ID NO: 1990 - protein, 213 aa, synthetic construct
DNQLTQSPSFLSASVGDRVTITCRASSSVNYIYWYQQKPGKAPKLLIYTTSNLAPGVPSRFSGSGSGNEYTLTISSLQPEDFATYYCQQFTSSPFTFGQGTKLEIKRTVAAPSVFIFPPSDEQLKSGTASVVCLLNNFYPREAKVQWKVDNALQSGNSQESVTEQDSKDSTYSLSSTLTLSKADYEKHKVYACEVTHQGLSSPVTKSFNRGEC

SEQ ID NO: 1991 - protein, 213 aa, synthetic construct
DNQLTQSPSFLSASVGDRVTITCRASSSVNYIYWYQQKPGKAPKLLIYVTSNLAPGVPSRFSGSGSGNEYTLTISSLQPEDFATYYCQQFTSSPFTFGQGTKLEIKRTVAAPSVFIFPPSDEQLKSGTASVVCLLNNFYPREAKVQWKVDNALQSGNSQESVTEQDSKDSTYSLSSTLTLSKADYEKHKVYACEVTHQGLSSPVTKSFNRGEC

SEQ ID NO: 1992 - protein, 213 aa, synthetic construct
DNQLTQSPSFLSASVGDRVTITCRASSSVNYIYWYQQKPGKAPKLLIYWTSNLAPGVPSRFSGSGSGNEYTLTISSLQPEDFATYYCQQFTSSPFTFGQGTKLEIKRTVAAPSVFIFPPSDEQLKSGTASVVCLLNNFYPREAKVQWKVDNALQSGNSQESVTEQDSKDSTYSLSSTLTLSKADYEKHKVYACEVTHQGLSSPVTKSFNRGEC

SEQ ID NO: 1993 - protein, 213 aa, synthetic construct
DNQLTQSPSFLSASVGDRVTITCRASSSVNYIYWYQQKPGKAPKLLIYYASNLAPGVPSRFSGSGSGNEYTLTISSLQPEDFATYYCQQFTSSPFTFGQGTKLEIKRTVAAPSVFIFPPSDEQLKSGTASVVCLLNNFYPREAKVQWKVDNALQSGNSQESVTEQDSKDSTYSLSSTLTLSKADYEKHKVYACEVTHQGLSSPVTKSFNRGEC

SEQ ID NO: 1994 - protein, 213 aa, synthetic construct
DNQLTQSPSFLSASVGDRVTITCRASSSVNYIYWYQQKPGKAPKLLIYYDSNLAPGVPSRFSGSGSGNEYTLTISSLQPEDFATYYCQQFTSSPFTFGQGTKLEIKRTVAAPSVFIFPPSDEQLKSGTASVVCLLNNFYPREAKVQWKVDNALQSGNSQESVTEQDSKDSTYSLSSTLTLSKADYEKHKVYACEVTHQGLSSPVTKSFNRGEC

SEQ ID NO: 1995 - protein, 213 aa, synthetic construct
DNQLTQSPSFLSASVGDRVTITCRASSSVNYIYWYQQKPGKAPKLLIYYESNLAPGVPSRFSGSGSGNEYTLTISSLQPEDFATYYCQQFTSSPFTFGQGTKLEIKRTVAAPSVFIFPPSDEQLKSGTASVVCLLNNFYPREAKVQWKVDNALQSGNSQESVTEQDSKDSTYSLSSTLTLSKADYEKHKVYACEVTHQGLSSPVTKSFNRGEC

SEQ ID NO: 1996 - protein, 213 aa, synthetic construct
DNQLTQSPSFLSASVGDRVTITCRASSSVNYIYWYQQKPGKAPKLLIYYFSNLAPGVPSRFSGSGSGNEYTLTISSLQPEDFATYYCQQFTSSPFTFGQGTKLEIKRTVAAPSVFIFPPSDEQLKSGTASVVCLLNNFYPREAKVQWKVDNALQSGNSQESVTEQDSKDSTYSLSSTLTLSKADYEKHKVYACEVTHQGLSSPVTKSFNRGEC

SEQ ID NO: 1997 - protein, 213 aa, synthetic construct
DNQLTQSPSFLSASVGDRVTITCRASSSVNYIYWYQQKPGKAPKLLIYYGSNLAPGVPSRFSGSGSGNEYTLTISSLQPEDFATYYCQQFTSSPFTFGQGTKLEIKRTVAAPSVFIFPPSDEQLKSGTASVVCLLNNFYPREAKVQWKVDNALQSGNSQESVTEQDSKDSTYSLSSTLTLSKADYEKHKVYACEVTHQGLSSPVTKSFNRGEC

SEQ ID NO: 1998 - protein, 213 aa, synthetic construct
DNQLTQSPSFLSASVGDRVTITCRASSSVNYIYWYQQKPGKAPKLLIYYHSNLAPGVPSRFSGSGSGNEYTLTISSLQPEDFATYYCQQFTSSPFTFGQGTKLEIKRTVAAPSVFIFPPSDEQLKSGTASVVCLLNNFYPREAKVQWKVDNALQSGNSQESVTEQDSKDSTYSLSSTLTLSKADYEKHKVYACEVTHQGLSSPVTKSFNRGEC

SEQ ID NO: 1999 - protein, 213 aa, synthetic construct
DNQLTQSPSFLSASVGDRVTITCRASSSVNYIYWYQQKPGKAPKLLIYYISNLAPGVPSRFSGSGSGNEYTLTISSLQPEDFATYYCQQFTSSPFTFGQGTKLEIKRTVAAPSVFIFPPSDEQLKSGTASVVCLLNNFYPREAKVQWKVDNALQSGNSQESVTEQDSKDSTYSLSSTLTLSKADYEKHKVYACEVTHQGLSSPVTKSFNRGEC

SEQ ID NO: 2000 - protein, 213 aa, synthetic construct
DNQLTQSPSFLSASVGDRVTITCRASSSVNYIYWYQQKPGKAPKLLIYYKSNLAPGVPSRFSGSGSGNEYTLTISSLQPEDFATYYCQQFTSSPFTFGQGTKLEIKRTVAAPSVFIFPPSDEQLKSGTASVVCLLNNFYPREAKVQWKVDNALQSGNSQESVTEQDSKDSTYSLSSTLTLSKADYEKHKVYACEVTHQGLSSPVTKSFNRGEC

SEQ ID NO: 2001 - protein, 213 aa, synthetic construct
DNQLTQSPSFLSASVGDRVTITCRASSSVNYIYWYQQKPGKAPKLLIYYLSNLAPGVPSRFSGSGSGNEYTLTISSLQPEDFATYYCQQFTSSPFTFGQGTKLEIKRTVAAPSVFIFPPSDEQLKSGTASVVCLLNNFYPREAKVQWKVDNALQSGNSQESVTEQDSKDSTYSLSSTLTLSKADYEKHKVYACEVTHQGLSSPVTKSFNRGEC

SEQ ID NO: 2002 - protein, 213 aa, synthetic construct
DNQLTQSPSFLSASVGDRVTITCRASSSVNYIYWYQQKPGKAPKLLIYYMSNLAPGVPSRFSGSGSGNEYTLTISSLQPEDFATYYCQQFTSSPFTFGQGTKLEIKRTVAAPSVFIFPPSDEQLKSGTASVVCLLNNFYPREAKVQWKVDNALQSGNSQESVTEQDSKDSTYSLSSTLTLSKADYEKHKVYACEVTHQGLSSPVTKSFNRGEC

SEQ ID NO: 2003 - protein, 213 aa, synthetic construct
DNQLTQSPSFLSASVGDRVTITCRASSSVNYIYWYQQKPGKAPKLLIYYNSNLAPGVPSRFSGSGSGNEYTLTISSLQPEDFATYYCQQFTSSPFTFGQGTKLEIKRTVAAPSVFIFPPSDEQLKSGTASVVCLLNNFYPREAKVQWKVDNALQSGNSQESVTEQDSKDSTYSLSSTLTLSKADYEKHKVYACEVTHQGLSSPVTKSFNRGEC

SEQ ID NO: 2004 - protein, 213 aa, synthetic construct
DNQLTQSPSFLSASVGDRVTITCRASSSVNYIYWYQQKPGKAPKLLIYYPSNLAPGVPSRFSGSGSGNEYTLTISSLQPEDFATYYCQQFTSSPFTFGQGTKLEIKRTVAAPSVFIFPPSDEQLKSGTASVVCLLNNFYPREAKVQWKVDNALQSGNSQESVTEQDSKDSTYSLSSTLTLSKADYEKHKVYACEVTHQGLSSPVTKSFNRGEC

SEQ ID NO: 2005 - protein, 213 aa, synthetic construct
DNQLTQSPSFLSASVGDRVTITCRASSSVNYIYWYQQKPGKAPKLLIYYQSNLAPGVPSRFSGSGSGNEYTLTISSLQPEDFATYYCQQFTSSPFTFGQGTKLEIKRTVAAPSVFIFPPSDEQLKSGTASVVCLLNNFYPREAKVQWKVDNALQSGNSQESVTEQDSKDSTYSLSSTLTLSKADYEKHKVYACEVTHQGLSSPVTKSFNRGEC

SEQ ID NO: 2006 - protein, 213 aa, synthetic construct
DNQLTQSPSFLSASVGDRVTITCRASSSVNYIYWYQQKPGKAPKLLIYYRSNLAPGVPSRFSGSGSGNEYTLTISSLQPEDFATYYCQQFTSSPFTFGQGTKLEIKRTVAAPSVFIFPPSDEQLKSGTASVVCLLNNFYPREAKVQWKVDNALQSGNSQESVTEQDSKDSTYSLSSTLTLSKADYEKHKVYACEVTHQGLSSPVTKSFNRGEC

SEQ ID NO: 2007 - protein, 213 aa, synthetic construct
DNQLTQSPSFLSASVGDRVTITCRASSSVNYIYWYQQKPGKAPKLLIYYSSNLAPGVPSRFSGSGSGNEYTLTISSLQPEDFATYYCQQFTSSPFTFGQGTKLEIKRTVAAPSVFIFPPSDEQLKSGTASVVCLLNNFYPREAKVQWKVDNALQSGNSQESVTEQDSKDSTYSLSSTLTLSKADYEKHKVYACEVTHQGLSSPVTKSFNRGEC

SEQ ID NO: 2008 - protein, 213 aa, synthetic construct
DNQLTQSPSFLSASVGDRVTITCRASSSVNYIYWYQQKPGKAPKLLIYYWSNLAPGVPSRFSGSGSGNEYTLTISSLQPEDFATYYCQQFTSSPFTFGQGTKLEIKRTVAAPSVFIFPPSDEQLKSGTASVVCLLNNFYPREAKVQWKVDNALQSGNSQESVTEQDSKDSTYSLSSTLTLSKADYEKHKVYACEVTHQGLSSPVTKSFNRGEC

SEQ ID NO: 2009 - protein, 213 aa, synthetic construct
DNQLTQSPSFLSASVGDRVTITCRASSSVNYIYWYQQKPGKAPKLLIYYYSNLAPGVPSRFSGSGSGNEYTLTISSLQPEDFATYYCQQFTSSPFTFGQGTKLEIKRTVAAPSVFIFPPSDEQLKSGTASVVCLLNNFYPREAKVQWKVDNALQSGNSQESVTEQDSKDSTYSLSSTLTLSKADYEKHKVYACEVTHQGLSSPVTKSFNRGEC

SEQ ID NO: 2010 - protein, 213 aa, synthetic construct
DNQLTQSPSFLSASVGDRVTITCRASSSVNYIYWYQQKPGKAPKLLIYYTANLAPGVPSRFSGSGSGNEYTLTISSLQPEDFATYYCQQFTSSPFTFGQGTKLEIKRTVAAPSVFIFPPSDEQLKSGTASVVCLLNNFYPREAKVQWKVDNALQSGNSQESVTEQDSKDSTYSLSSTLTLSKADYEKHKVYACEVTHQGLSSPVTKSFNRGEC

SEQ ID NO: 2011 - protein, 213 aa, synthetic construct
DNQLTQSPSFLSASVGDRVTITCRASSSVNYIYWYQQKPGKAPKLLIYYTCNLAPGVPSRFSGSGSGNEYTLTISSLQPEDFATYYCQQFTSSPFTFGQGTKLEIKRTVAAPSVFIFPPSDEQLKSGTASVVCLLNNFYPREAKVQWKVDNALQSGNSQESVTEQDSKDSTYSLSSTLTLSKADYEKHKVYACEVTHQGLSSPVTKSFNRGEC

SEQ ID NO: 2012 - protein, 213 aa, synthetic construct
DNQLTQSPSFLSASVGDRVTITCRASSSVNYIYWYQQKPGKAPKLLIYYTDNLAPGVPSRFSGSGSGNEYTLTISSLQPEDFATYYCQQFTSSPFTFGQGTKLEIKRTVAAPSVFIFPPSDEQLKSGTASVVCLLNNFYPREAKVQWKVDNALQSGNSQESVTEQDSKDSTYSLSSTLTLSKADYEKHKVYACEVTHQGLSSPVTKSFNRGEC

SEQ ID NO: 2013 - protein, 213 aa, synthetic construct
DNQLTQSPSFLSASVGDRVTITCRASSSVNYIYWYQQKPGKAPKLLIYYTENLAPGVPSRFSGSGSGNEYTLTISSLQPEDFATYYCQQFTSSPFTFGQGTKLEIKRTVAAPSVFIFPPSDEQLKSGTASVVCLLNNFYPREAKVQWKVDNALQSGNSQESVTEQDSKDSTYSLSSTLTLSKADYEKHKVYACEVTHQGLSSPVTKSFNRGEC

SEQ ID NO: 2014 - protein, 213 aa, synthetic construct
DNQLTQSPSFLSASVGDRVTITCRASSSVNYIYWYQQKPGKAPKLLIYYTFNLAPGVPSRFSGSGSGNEYTLTISSLQPEDFATYYCQQFTSSPFTFGQGTKLEIKRTVAAPSVFIFPPSDEQLKSGTASVVCLLNNFYPREAKVQWKVDNALQSGNSQESVTEQDSKDSTYSLSSTLTLSKADYEKHKVYACEVTHQGLSSPVTKSFNRGEC

SEQ ID NO: 2015 - protein, 213 aa, synthetic construct
DNQLTQSPSFLSASVGDRVTITCRASSSVNYIYWYQQKPGKAPKLLIYYTGNLAPGVPSRFSGSGSGNEYTLTISSLQPEDFATYYCQQFTSSPFTFGQGTKLEIKRTVAAPSVFIFPPSDEQLKSGTASVVCLLNNFYPREAKVQWKVDNALQSGNSQESVTEQDSKDSTYSLSSTLTLSKADYEKHKVYACEVTHQGLSSPVTKSFNRGEC

SEQ ID NO: 2016 - protein, 213 aa, synthetic construct
DNQLTQSPSFLSASVGDRVTITCRASSSVNYIYWYQQKPGKAPKLLIYYTHNLAPGVPSRFSGSGSGNEYTLTISSLQPEDFATYYCQQFTSSPFTFGQGTKLEIKRTVAAPSVFIFPPSDEQLKSGTASVVCLLNNFYPREAKVQWKVDNALQSGNSQESVTEQDSKDSTYSLSSTLTLSKADYEKHKVYACEVTHQGLSSPVTKSFNRGEC

SEQ ID NO: 2017 - protein, 213 aa, synthetic construct
DNQLTQSPSFLSASVGDRVTITCRASSSVNYIYWYQQKPGKAPKLLIYYTINLAPGVPSRFSGSGSGNEYTLTISSLQPEDFATYYCQQFTSSPFTFGQGTKLEIKRTVAAPSVFIFPPSDEQLKSGTASVVCLLNNFYPREAKVQWKVDNALQSGNSQESVTEQDSKDSTYSLSSTLTLSKADYEKHKVYACEVTHQGLSSPVTKSFNRGEC

SEQ ID NO: 2018 - protein, 213 aa, synthetic construct
DNQLTQSPSFLSASVGDRVTITCRASSSVNYIYWYQQKPGKAPKLLIYYTLNLAPGVPSRFSGSGSGNEYTLTISSLQPEDFATYYCQQFTSSPFTFGQGTKLEIKRTVAAPSVFIFPPSDEQLKSGTASVVCLLNNFYPREAKVQWKVDNALQSGNSQESVTEQDSKDSTYSLSSTLTLSKADYEKHKVYACEVTHQGLSSPVTKSFNRGEC

SEQ ID NO: 2019 - protein, 213 aa, synthetic construct
DNQLTQSPSFLSASVGDRVTITCRASSSVNYIYWYQQKPGKAPKLLIYYTPNLAPGVPSRFSGSGSGNEYTLTISSLQPEDFATYYCQQFTSSPFTFGQGTKLEIKRTVAAPSVFIFPPSDEQLKSGTASVVCLLNNFYPREAKVQWKVDNALQSGNSQESVTEQDSKDSTYSLSSTLTLSKADYEKHKVYACEVTHQGLSSPVTKSFNRGEC

SEQ ID NO: 2020 - protein, 213 aa, synthetic construct
DNQLTQSPSFLSASVGDRVTITCRASSSVNYIYWYQQKPGKAPKLLIYYTQNLAPGVPSRFSGSGSGNEYTLTISSLQPEDFATYYCQQFTSSPFTFGQGTKLEIKRTVAAPSVFIFPPSDEQLKSGTASVVCLLNNFYPREAKVQWKVDNALQSGNSQESVTEQDSKDSTYSLSSTLTLSKADYEKHKVYACEVTHQGLSSPVTKSFNRGEC

SEQ ID NO: 2021 - protein, 213 aa, synthetic construct
DNQLTQSPSFLSASVGDRVTITCRASSSVNYIYWYQQKPGKAPKLLIYYTRNLAPGVPSRFSGSGSGNEYTLTISSLQPEDFATYYCQQFTSSPFTFGQGTKLEIKRTVAAPSVFIFPPSDEQLKSGTASVVCLLNNFYPREAKVQWKVDNALQSGNSQESVTEQDSKDSTYSLSSTLTLSKADYEKHKVYACEVTHQGLSSPVTKSFNRGEC

SEQ ID NO: 2022 - protein, 213 aa, synthetic construct
DNQLTQSPSFLSASVGDRVTITCRASSSVNYIYWYQQKPGKAPKLLIYYTTNLAPGVPSRFSGSGSGNEYTLTISSLQPEDFATYYCQQFTSSPFTFGQGTKLEIKRTVAAPSVFIFPPSDEQLKSGTASVVCLLNNFYPREAKVQWKVDNALQSGNSQESVTEQDSKDSTYSLSSTLTLSKADYEKHKVYACEVTHQGLSSPVTKSFNRGEC

SEQ ID NO: 2023 - protein, 213 aa, synthetic construct
DNQLTQSPSFLSASVGDRVTITCRASSSVNYIYWYQQKPGKAPKLLIYYTVNLAPGVPSRFSGSGSGNEYTLTISSLQPEDFATYYCQQFTSSPFTFGQGTKLEIKRTVAAPSVFIFPPSDEQLKSGTASVVCLLNNFYPREAKVQWKVDNALQSGNSQESVTEQDSKDSTYSLSSTLTLSKADYEKHKVYACEVTHQGLSSPVTKSFNRGEC

SEQ ID NO: 2024 - protein, 213 aa, synthetic construct
DNQLTQSPSFLSASVGDRVTITCRASSSVNYIYWYQQKPGKAPKLLIYYTWNLAPGVPSRFSGSGSGNEYTLTISSLQPEDFATYYCQQFTSSPFTFGQGTKLEIKRTVAAPSVFIFPPSDEQLKSGTASVVCLLNNFYPREAKVQWKVDNALQSGNSQESVTEQDSKDSTYSLSSTLTLSKADYEKHKVYACEVTHQGLSSPVTKSFNRGEC

SEQ ID NO: 2025 - protein, 213 aa, synthetic construct
DNQLTQSPSFLSASVGDRVTITCRASSSVNYIYWYQQKPGKAPKLLIYYTYNLAPGVPSRFSGSGSGNEYTLTISSLQPEDFATYYCQQFTSSPFTFGQGTKLEIKRTVAAPSVFIFPPSDEQLKSGTASVVCLLNNFYPREAKVQWKVDNALQSGNSQESVTEQDSKDSTYSLSSTLTLSKADYEKHKVYACEVTHQGLSSPVTKSFNRGEC

SEQ ID NO: 2026 - protein, 213 aa, synthetic construct
DNQLTQSPSFLSASVGDRVTITCRASSSVNYIYWYQQKPGKAPKLLIYYTSALAPGVPSRFSGSGSGNEYTLTISSLQPEDFATYYCQQFTSSPFTFGQGTKLEIKRTVAAPSVFIFPPSDEQLKSGTASVVCLLNNFYPREAKVQWKVDNALQSGNSQESVTEQDSKDSTYSLSSTLTLSKADYEKHKVYACEVTHQGLSSPVTKSFNRGEC

SEQ ID NO: 2027 - protein, 213 aa, synthetic construct
DNQLTQSPSFLSASVGDRVTITCRASSSVNYIYWYQQKPGKAPKLLIYYTSDLAPGVPSRFSGSGSGNEYTLTISSLQPEDFATYYCQQFTSSPFTFGQGTKLEIKRTVAAPSVFIFPPSDEQLKSGTASVVCLLNNFYPREAKVQWKVDNALQSGNSQESVTEQDSKDSTYSLSSTLTLSKADYEKHKVYACEVTHQGLSSPVTKSFNRGEC

SEQ ID NO: 2028 - protein, 213 aa, synthetic construct
DNQLTQSPSFLSASVGDRVTITCRASSSVNYIYWYQQKPGKAPKLLIYYTSELAPGVPSRFSGSGSGNEYTLTISSLQPEDFATYYCQQFTSSPFTFGQGTKLEIKRTVAAPSVFIFPPSDEQLKSGTASVVCLLNNFYPREAKVQWKVDNALQSGNSQESVTEQDSKDSTYSLSSTLTLSKADYEKHKVYACEVTHQGLSSPVTKSFNRGEC

SEQ ID NO: 2029 - protein, 213 aa, synthetic construct
DNQLTQSPSFLSASVGDRVTITCRASSSVNYIYWYQQKPGKAPKLLIYYTSFLAPGVPSRFSGSGSGNEYTLTISSLQPEDFATYYCQQFTSSPFTFGQGTKLEIKRTVAAPSVFIFPPSDEQLKSGTASVVCLLNNFYPREAKVQWKVDNALQSGNSQESVTEQDSKDSTYSLSSTLTLSKADYEKHKVYACEVTHQGLSSPVTKSFNRGEC

SEQ ID NO: 2030 - protein, 213 aa, synthetic construct
DNQLTQSPSFLSASVGDRVTITCRASSSVNYIYWYQQKPGKAPKLLIYYTSGLAPGVPSRFSGSGSGNEYTLTISSLQPEDFATYYCQQFTSSPFTFGQGTKLEIKRTVAAPSVFIFPPSDEQLKSGTASVVCLLNNFYPREAKVQWKVDNALQSGNSQESVTEQDSKDSTYSLSSTLTLSKADYEKHKVYACEVTHQGLSSPVTKSFNRGEC

SEQ ID NO: 2031 - protein, 213 aa, synthetic construct
DNQLTQSPSFLSASVGDRVTITCRASSSVNYIYWYQQKPGKAPKLLIYYTSHLAPGVPSRFSGSGSGNEYTLTISSLQPEDFATYYCQQFTSSPFTFGQGTKLEIKRTVAAPSVFIFPPSDEQLKSGTASVVCLLNNFYPREAKVQWKVDNALQSGNSQESVTEQDSKDSTYSLSSTLTLSKADYEKHKVYACEVTHQGLSSPVTKSFNRGEC

SEQ ID NO: 2032 - protein, 213 aa, synthetic construct
DNQLTQSPSFLSASVGDRVTITCRASSSVNYIYWYQQKPGKAPKLLIYYTSILAPGVPSRFSGSGSGNEYTLTISSLQPEDFATYYCQQFTSSPFTFGQGTKLEIKRTVAAPSVFIFPPSDEQLKSGTASVVCLLNNFYPREAKVQWKVDNALQSGNSQESVTEQDSKDSTYSLSSTLTLSKADYEKHKVYACEVTHQGLSSPVTKSFNRGEC

SEQ ID NO: 2033 - protein, 213 aa, synthetic construct
DNQLTQSPSFLSASVGDRVTITCRASSSVNYIYWYQQKPGKAPKLLIYYTSLLAPGVPSRFSGSGSGNEYTLTISSLQPEDFATYYCQQFTSSPFTFGQGTKLEIKRTVAAPSVFIFPPSDEQLKSGTASVVCLLNNFYPREAKVQWKVDNALQSGNSQESVTEQDSKDSTYSLSSTLTLSKADYEKHKVYACEVTHQGLSSPVTKSFNRGEC

SEQ ID NO: 2034 - protein, 213 aa, synthetic construct
DNQLTQSPSFLSASVGDRVTITCRASSSVNYIYWYQQKPGKAPKLLIYYTSMLAPGVPSRFSGSGSGNEYTLTISSLQPEDFATYYCQQFTSSPFTFGQGTKLEIKRTVAAPSVFIFPPSDEQLKSGTASVVCLLNNFYPREAKVQWKVDNALQSGNSQESVTEQDSKDSTYSLSSTLTLSKADYEKHKVYACEVTHQGLSSPVTKSFNRGEC

SEQ ID NO: 2035 - protein, 213 aa, synthetic construct
DNQLTQSPSFLSASVGDRVTITCRASSSVNYIYWYQQKPGKAPKLLIYYTSPLAPGVPSRFSGSGSGNEYTLTISSLQPEDFATYYCQQFTSSPFTFGQGTKLEIKRTVAAPSVFIFPPSDEQLKSGTASVVCLLNNFYPREAKVQWKVDNALQSGNSQESVTEQDSKDSTYSLSSTLTLSKADYEKHKVYACEVTHQGLSSPVTKSFNRGEC

SEQ ID NO: 2036 - protein, 213 aa, synthetic construct
DNQLTQSPSFLSASVGDRVTITCRASSSVNYIYWYQQKPGKAPKLLIYYTSSLAPGVPSRFSGSGSGNEYTLTISSLQPEDFATYYCQQFTSSPFTFGQGTKLEIKRTVAAPSVFIFPPSDEQLKSGTASVVCLLNNFYPREAKVQWKVDNALQSGNSQESVTEQDSKDSTYSLSSTLTLSKADYEKHKVYACEVTHQGLSSPVTKSFNRGEC

SEQ ID NO: 2037 - protein, 213 aa, synthetic construct
DNQLTQSPSFLSASVGDRVTITCRASSSVNYIYWYQQKPGKAPKLLIYYTSVLAPGVPSRFSGSGSGNEYTLTISSLQPEDFATYYCQQFTSSPFTFGQGTKLEIKRTVAAPSVFIFPPSDEQLKSGTASVVCLLNNFYPREAKVQWKVDNALQSGNSQESVTEQDSKDSTYSLSSTLTLSKADYEKHKVYACEVTHQGLSSPVTKSFNRGEC

SEQ ID NO: 2038 - protein, 213 aa, synthetic construct
DNQLTQSPSFLSASVGDRVTITCRASSSVNYIYWYQQKPGKAPKLLIYYTSWLAPGVPSRFSGSGSGNEYTLTISSLQPEDFATYYCQQFTSSPFTFGQGTKLEIKRTVAAPSVFIFPPSDEQLKSGTASVVCLLNNFYPREAKVQWKVDNALQSGNSQESVTEQDSKDSTYSLSSTLTLSKADYEKHKVYACEVTHQGLSSPVTKSFNRGEC

SEQ ID NO: 2039 - protein, 213 aa, synthetic construct
DNQLTQSPSFLSASVGDRVTITCRASSSVNYIYWYQQKPGKAPKLLIYYTSYLAPGVPSRFSGSGSGNEYTLTISSLQPEDFATYYCQQFTSSPFTFGQGTKLEIKRTVAAPSVFIFPPSDEQLKSGTASVVCLLNNFYPREAKVQWKVDNALQSGNSQESVTEQDSKDSTYSLSSTLTLSKADYEKHKVYACEVTHQGLSSPVTKSFNRGEC

SEQ ID NO: 2040 - protein, 213 aa, synthetic construct
DNQLTQSPSFLSASVGDRVTITCRASSSVNYIYWYQQKPGKAPKLLIYYTSNAAPGVPSRFSGSGSGNEYTLTISSLQPEDFATYYCQQFTSSPFTFGQGTKLEIKRTVAAPSVFIFPPSDEQLKSGTASVVCLLNNFYPREAKVQWKVDNALQSGNSQESVTEQDSKDSTYSLSSTLTLSKADYEKHKVYACEVTHQGLSSPVTKSFNRGEC

SEQ ID NO: 2041 - protein, 213 aa, synthetic construct
DNQLTQSPSFLSASVGDRVTITCRASSSVNYIYWYQQKPGKAPKLLIYYTSNCAPGVPSRFSGSGSGNEYTLTISSLQPEDFATYYCQQFTSSPFTFGQGTKLEIKRTVAAPSVFIFPPSDEQLKSGTASVVCLLNNFYPREAKVQWKVDNALQSGNSQESVTEQDSKDSTYSLSSTLTLSKADYEKHKVYACEVTHQGLSSPVTKSFNRGEC

SEQ ID NO: 2042 - protein, 213 aa, synthetic construct
DNQLTQSPSFLSASVGDRVTITCRASSSVNYIYWYQQKPGKAPKLLIYYTSNDAPGVPSRFSGSGSGNEYTLTISSLQPEDFATYYCQQFTSSPFTFGQGTKLEIKRTVAAPSVFIFPPSDEQLKSGTASVVCLLNNFYPREAKVQWKVDNALQSGNSQESVTEQDSKDSTYSLSSTLTLSKADYEKHKVYACEVTHQGLSSPVTKSFNRGEC

SEQ ID NO: 2043 - protein, 213 aa, synthetic construct
DNQLTQSPSFLSASVGDRVTITCRASSSVNYIYWYQQKPGKAPKLLIYYTSNEAPGVPSRFSGSGSGNEYTLTISSLQPEDFATYYCQQFTSSPFTFGQGTKLEIKRTVAAPSVFIFPPSDEQLKSGTASVVCLLNNFYPREAKVQWKVDNALQSGNSQESVTEQDSKDSTYSLSSTLTLSKADYEKHKVYACEVTHQGLSSPVTKSFNRGEC

SEQ ID NO: 2044 - protein, 213 aa, synthetic construct
DNQLTQSPSFLSASVGDRVTITCRASSSVNYIYWYQQKPGKAPKLLIYYTSNFAPGVPSRFSGSGSGNEYTLTISSLQPEDFATYYCQQFTSSPFTFGQGTKLEIKRTVAAPSVFIFPPSDEQLKSGTASVVCLLNNFYPREAKVQWKVDNALQSGNSQESVTEQDSKDSTYSLSSTLTLSKADYEKHKVYACEVTHQGLSSPVTKSFNRGEC

SEQ ID NO: 2045 - protein, 213 aa, synthetic construct
DNQLTQSPSFLSASVGDRVTITCRASSSVNYIYWYQQKPGKAPKLLIYYTSNGAPGVPSRFSGSGSGNEYTLTISSLQPEDFATYYCQQFTSSPFTFGQGTKLEIKRTVAAPSVFIFPPSDEQLKSGTASVVCLLNNFYPREAKVQWKVDNALQSGNSQESVTEQDSKDSTYSLSSTLTLSKADYEKHKVYACEVTHQGLSSPVTKSFNRGEC

SEQ ID NO: 2046 - protein, 213 aa, synthetic construct
DNQLTQSPSFLSASVGDRVTITCRASSSVNYIYWYQQKPGKAPKLLIYYTSNHAPGVPSRFSGSGSGNEYTLTISSLQPEDFATYYCQQFTSSPFTFGQGTKLEIKRTVAAPSVFIFPPSDEQLKSGTASVVCLLNNFYPREAKVQWKVDNALQSGNSQESVTEQDSKDSTYSLSSTLTLSKADYEKHKVYACEVTHQGLSSPVTKSFNRGEC

SEQ ID NO: 2047 - protein, 213 aa, synthetic construct
DNQLTQSPSFLSASVGDRVTITCRASSSVNYIYWYQQKPGKAPKLLIYYTSNIAPGVPSRFSGSGSGNEYTLTISSLQPEDFATYYCQQFTSSPFTFGQGTKLEIKRTVAAPSVFIFPPSDEQLKSGTASVVCLLNNFYPREAKVQWKVDNALQSGNSQESVTEQDSKDSTYSLSSTLTLSKADYEKHKVYACEVTHQGLSSPVTKSFNRGEC

SEQ ID NO: 2048 - protein, 213 aa, synthetic construct
DNQLTQSPSFLSASVGDRVTITCRASSSVNYIYWYQQKPGKAPKLLIYYTSNKAPGVPSRFSGSGSGNEYTLTISSLQPEDFATYYCQQFTSSPFTFGQGTKLEIKRTVAAPSVFIFPPSDEQLKSGTASVVCLLNNFYPREAKVQWKVDNALQSGNSQESVTEQDSKDSTYSLSSTLTLSKADYEKHKVYACEVTHQGLSSPVTKSFNRGEC

SEQ ID NO: 2049 - protein, 213 aa, synthetic construct
DNQLTQSPSFLSASVGDRVTITCRASSSVNYIYWYQQKPGKAPKLLIYYTSNNAPGVPSRFSGSGSGNEYTLTISSLQPEDFATYYCQQFTSSPFTFGQGTKLEIKRTVAAPSVFIFPPSDEQLKSGTASVVCLLNNFYPREAKVQWKVDNALQSGNSQESVTEQDSKDSTYSLSSTLTLSKADYEKHKVYACEVTHQGLSSPVTKSFNRGEC

SEQ ID NO: 2050 - protein, 213 aa, synthetic construct
DNQLTQSPSFLSASVGDRVTITCRASSSVNYIYWYQQKPGKAPKLLIYYTSNPAPGVPSRFSGSGSGNEYTLTISSLQPEDFATYYCQQFTSSPFTFGQGTKLEIKRTVAAPSVFIFPPSDEQLKSGTASVVCLLNNFYPREAKVQWKVDNALQSGNSQESVTEQDSKDSTYSLSSTLTLSKADYEKHKVYACEVTHQGLSSPVTKSFNRGEC

SEQ ID NO: 2051 - protein, 213 aa, synthetic construct
DNQLTQSPSFLSASVGDRVTITCRASSSVNYIYWYQQKPGKAPKLLIYYTSNRAPGVPSRFSGSGSGNEYTLTISSLQPEDFATYYCQQFTSSPFTFGQGTKLEIKRTVAAPSVFIFPPSDEQLKSGTASVVCLLNNFYPREAKVQWKVDNALQSGNSQESVTEQDSKDSTYSLSSTLTLSKADYEKHKVYACEVTHQGLSSPVTKSFNRGEC

SEQ ID NO: 2052 - protein, 213 aa, synthetic construct
DNQLTQSPSFLSASVGDRVTITCRASSSVNYIYWYQQKPGKAPKLLIYYTSNTAPGVPSRFSGSGSGNEYTLTISSLQPEDFATYYCQQFTSSPFTFGQGTKLEIKRTVAAPSVFIFPPSDEQLKSGTASVVCLLNNFYPREAKVQWKVDNALQSGNSQESVTEQDSKDSTYSLSSTLTLSKADYEKHKVYACEVTHQGLSSPVTKSFNRGEC

SEQ ID NO: 2053 - protein, 213 aa, synthetic construct
DNQLTQSPSFLSASVGDRVTITCRASSSVNYIYWYQQKPGKAPKLLIYYTSNVAPGVPSRFSGSGSGNEYTLTISSLQPEDFATYYCQQFTSSPFTFGQGTKLEIKRTVAAPSVFIFPPSDEQLKSGTASVVCLLNNFYPREAKVQWKVDNALQSGNSQESVTEQDSKDSTYSLSSTLTLSKADYEKHKVYACEVTHQGLSSPVTKSFNRGEC

SEQ ID NO: 2054 - protein, 213 aa, synthetic construct
DNQLTQSPSFLSASVGDRVTITCRASSSVNYIYWYQQKPGKAPKLLIYYTSNWAPGVPSRFSGSGSGNEYTLTISSLQPEDFATYYCQQFTSSPFTFGQGTKLEIKRTVAAPSVFIFPPSDEQLKSGTASVVCLLNNFYPREAKVQWKVDNALQSGNSQESVTEQDSKDSTYSLSSTLTLSKADYEKHKVYACEVTHQGLSSPVTKSFNRGEC

SEQ ID NO: 2055 - protein, 213 aa, synthetic construct
DNQLTQSPSFLSASVGDRVTITCRASSSVNYIYWYQQKPGKAPKLLIYYTSNYAPGVPSRFSGSGSGNEYTLTISSLQPEDFATYYCQQFTSSPFTFGQGTKLEIKRTVAAPSVFIFPPSDEQLKSGTASVVCLLNNFYPREAKVQWKVDNALQSGNSQESVTEQDSKDSTYSLSSTLTLSKADYEKHKVYACEVTHQGLSSPVTKSFNRGEC

SEQ ID NO: 2056 - protein, 213 aa, synthetic construct
DNQLTQSPSFLSASVGDRVTITCRASSSVNYIYWYQQKPGKAPKLLIYYTSNLDPGVPSRFSGSGSGNEYTLTISSLQPEDFATYYCQQFTSSPFTFGQGTKLEIKRTVAAPSVFIFPPSDEQLKSGTASVVCLLNNFYPREAKVQWKVDNALQSGNSQESVTEQDSKDSTYSLSSTLTLSKADYEKHKVYACEVTHQGLSSPVTKSFNRGEC

SEQ ID NO: 2057 - protein, 213 aa, synthetic construct
DNQLTQSPSFLSASVGDRVTITCRASSSVNYIYWYQQKPGKAPKLLIYYTSNLEPGVPSRFSGSGSGNEYTLTISSLQPEDFATYYCQQFTSSPFTFGQGTKLEIKRTVAAPSVFIFPPSDEQLKSGTASVVCLLNNFYPREAKVQWKVDNALQSGNSQESVTEQDSKDSTYSLSSTLTLSKADYEKHKVYACEVTHQGLSSPVTKSFNRGEC

SEQ ID NO: 2058 - protein, 213 aa, synthetic construct
DNQLTQSPSFLSASVGDRVTITCRASSSVNYIYWYQQKPGKAPKLLIYYTSNLFPGVPSRFSGSGSGNEYTLTISSLQPEDFATYYCQQFTSSPFTFGQGTKLEIKRTVAAPSVFIFPPSDEQLKSGTASVVCLLNNFYPREAKVQWKVDNALQSGNSQESVTEQDSKDSTYSLSSTLTLSKADYEKHKVYACEVTHQGLSSPVTKSFNRGEC

SEQ ID NO: 2059 - protein, 213 aa, synthetic construct
DNQLTQSPSFLSASVGDRVTITCRASSSVNYIYWYQQKPGKAPKLLIYYTSNLGPGVPSRFSGSGSGNEYTLTISSLQPEDFATYYCQQFTSSPFTFGQGTKLEIKRTVAAPSVFIFPPSDEQLKSGTASVVCLLNNFYPREAKVQWKVDNALQSGNSQESVTEQDSKDSTYSLSSTLTLSKADYEKHKVYACEVTHQGLSSPVTKSFNRGEC

SEQ ID NO: 2060 - protein, 213 aa, synthetic construct
DNQLTQSPSFLSASVGDRVTITCRASSSVNYIYWYQQKPGKAPKLLIYYTSNLHPGVPSRFSGSGSGNEYTLTISSLQPEDFATYYCQQFTSSPFTFGQGTKLEIKRTVAAPSVFIFPPSDEQLKSGTASVVCLLNNFYPREAKVQWKVDNALQSGNSQESVTEQDSKDSTYSLSSTLTLSKADYEKHKVYACEVTHQGLSSPVTKSFNRGEC

SEQ ID NO: 2061 - protein, 213 aa, synthetic construct
DNQLTQSPSFLSASVGDRVTITCRASSSVNYIYWYQQKPGKAPKLLIYYTSNLIPGVPSRFSGSGSGNEYTLTISSLQPEDFATYYCQQFTSSPFTFGQGTKLEIKRTVAAPSVFIFPPSDEQLKSGTASVVCLLNNFYPREAKVQWKVDNALQSGNSQESVTEQDSKDSTYSLSSTLTLSKADYEKHKVYACEVTHQGLSSPVTKSFNRGEC

SEQ ID NO: 2062 - protein, 213 aa, synthetic construct
DNQLTQSPSFLSASVGDRVTITCRASSSVNYIYWYQQKPGKAPKLLIYYTSNLKPGVPSRFSGSGSGNEYTLTISSLQPEDFATYYCQQFTSSPFTFGQGTKLEIKRTVAAPSVFIFPPSDEQLKSGTASVVCLLNNFYPREAKVQWKVDNALQSGNSQESVTEQDSKDSTYSLSSTLTLSKADYEKHKVYACEVTHQGLSSPVTKSFNRGEC

SEQ ID NO: 2063 - protein, 213 aa, synthetic construct
DNQLTQSPSFLSASVGDRVTITCRASSSVNYIYWYQQKPGKAPKLLIYYTSNLNPGVPSRFSGSGSGNEYTLTISSLQPEDFATYYCQQFTSSPFTFGQGTKLEIKRTVAAPSVFIFPPSDEQLKSGTASVVCLLNNFYPREAKVQWKVDNALQSGNSQESVTEQDSKDSTYSLSSTLTLSKADYEKHKVYACEVTHQGLSSPVTKSFNRGEC

SEQ ID NO: 2064 - protein, 213 aa, synthetic construct
DNQLTQSPSFLSASVGDRVTITCRASSSVNYIYWYQQKPGKAPKLLIYYTSNLPPGVPSRFSGSGSGNEYTLTISSLQPEDFATYYCQQFTSSPFTFGQGTKLEIKRTVAAPSVFIFPPSDEQLKSGTASVVCLLNNFYPREAKVQWKVDNALQSGNSQESVTEQDSKDSTYSLSSTLTLSKADYEKHKVYACEVTHQGLSSPVTKSFNRGEC

SEQ ID NO: 2065 - protein, 213 aa, synthetic construct
DNQLTQSPSFLSASVGDRVTITCRASSSVNYIYWYQQKPGKAPKLLIYYTSNLQPGVPSRFSGSGSGNEYTLTISSLQPEDFATYYCQQFTSSPFTFGQGTKLEIKRTVAAPSVFIFPPSDEQLKSGTASVVCLLNNFYPREAKVQWKVDNALQSGNSQESVTEQDSKDSTYSLSSTLTLSKADYEKHKVYACEVTHQGLSSPVTKSFNRGEC

SEQ ID NO: 2066 - protein, 213 aa, synthetic construct
DNQLTQSPSFLSASVGDRVTITCRASSSVNYIYWYQQKPGKAPKLLIYYTSNLTPGVPSRFSGSGSGNEYTLTISSLQPEDFATYYCQQFTSSPFTFGQGTKLEIKRTVAAPSVFIFPPSDEQLKSGTASVVCLLNNFYPREAKVQWKVDNALQSGNSQESVTEQDSKDSTYSLSSTLTLSKADYEKHKVYACEVTHQGLSSPVTKSFNRGEC

SEQ ID NO: 2067 - protein, 213 aa, synthetic construct
DNQLTQSPSFLSASVGDRVTITCRASSSVNYIYWYQQKPGKAPKLLIYYTSNLVPGVPSRFSGSGSGNEYTLTISSLQPEDFATYYCQQFTSSPFTFGQGTKLEIKRTVAAPSVFIFPPSDEQLKSGTASVVCLLNNFYPREAKVQWKVDNALQSGNSQESVTEQDSKDSTYSLSSTLTLSKADYEKHKVYACEVTHQGLSSPVTKSFNRGEC

SEQ ID NO: 2068 - protein, 213 aa, synthetic construct
DNQLTQSPSFLSASVGDRVTITCRASSSVNYIYWYQQKPGKAPKLLIYYTSNLYPGVPSRFSGSGSGNEYTLTISSLQPEDFATYYCQQFTSSPFTFGQGTKLEIKRTVAAPSVFIFPPSDEQLKSGTASVVCLLNNFYPREAKVQWKVDNALQSGNSQESVTEQDSKDSTYSLSSTLTLSKADYEKHKVYACEVTHQGLSSPVTKSFNRGEC

SEQ ID NO: 2069 - protein, 213 aa, synthetic construct
DNQLTQSPSFLSASVGDRVTITCRASSSVNYIYWYQQKPGKAPKLLIYYTSNLADGVPSRFSGSGSGNEYTLTISSLQPEDFATYYCQQFTSSPFTFGQGTKLEIKRTVAAPSVFIFPPSDEQLKSGTASVVCLLNNFYPREAKVQWKVDNALQSGNSQESVTEQDSKDSTYSLSSTLTLSKADYEKHKVYACEVTHQGLSSPVTKSFNRGEC

SEQ ID NO: 2070 - protein, 213 aa, synthetic construct
DNQLTQSPSFLSASVGDRVTITCRASSSVNYIYWYQQKPGKAPKLLIYYTSNLAEGVPSRFSGSGSGNEYTLTISSLQPEDFATYYCQQFTSSPFTFGQGTKLEIKRTVAAPSVFIFPPSDEQLKSGTASVVCLLNNFYPREAKVQWKVDNALQSGNSQESVTEQDSKDSTYSLSSTLTLSKADYEKHKVYACEVTHQGLSSPVTKSFNRGEC

SEQ ID NO: 2071 - protein, 213 aa, synthetic construct
DNQLTQSPSFLSASVGDRVTITCRASSSVNYIYWYQQKPGKAPKLLIYYTSNLAFGVPSRFSGSGSGNEYTLTISSLQPEDFATYYCQQFTSSPFTFGQGTKLEIKRTVAAPSVFIFPPSDEQLKSGTASVVCLLNNFYPREAKVQWKVDNALQSGNSQESVTEQDSKDSTYSLSSTLTLSKADYEKHKVYACEVTHQGLSSPVTKSFNRGEC

SEQ ID NO: 2072 - protein, 213 aa, synthetic construct
DNQLTQSPSFLSASVGDRVTITCRASSSVNYIYWYQQKPGKAPKLLIYYTSNLAGGVPSRFSGSGSGNEYTLTISSLQPEDFATYYCQQFTSSPFTFGQGTKLEIKRTVAAPSVFIFPPSDEQLKSGTASVVCLLNNFYPREAKVQWKVDNALQSGNSQESVTEQDSKDSTYSLSSTLTLSKADYEKHKVYACEVTHQGLSSPVTKSFNRGEC

SEQ ID NO: 2073 - protein, 213 aa, synthetic construct
DNQLTQSPSFLSASVGDRVTITCRASSSVNYIYWYQQKPGKAPKLLIYYTSNLAHGVPSRFSGSGSGNEYTLTISSLQPEDFATYYCQQFTSSPFTFGQGTKLEIKRTVAAPSVFIFPPSDEQLKSGTASVVCLLNNFYPREAKVQWKVDNALQSGNSQESVTEQDSKDSTYSLSSTLTLSKADYEKHKVYACEVTHQGLSSPVTKSFNRGEC

SEQ ID NO: 2074 - protein, 213 aa, synthetic construct
DNQLTQSPSFLSASVGDRVTITCRASSSVNYIYWYQQKPGKAPKLLIYYTSNLAIGVPSRFSGSGSGNEYTLTISSLQPEDFATYYCQQFTSSPFTFGQGTKLEIKRTVAAPSVFIFPPSDEQLKSGTASVVCLLNNFYPREAKVQWKVDNALQSGNSQESVTEQDSKDSTYSLSSTLTLSKADYEKHKVYACEVTHQGLSSPVTKSFNRGEC

SEQ ID NO: 2075 - protein, 213 aa, synthetic construct
DNQLTQSPSFLSASVGDRVTITCRASSSVNYIYWYQQKPGKAPKLLIYYTSNLALGVPSRFSGSGSGNEYTLTISSLQPEDFATYYCQQFTSSPFTFGQGTKLEIKRTVAAPSVFIFPPSDEQLKSGTASVVCLLNNFYPREAKVQWKVDNALQSGNSQESVTEQDSKDSTYSLSSTLTLSKADYEKHKVYACEVTHQGLSSPVTKSFNRGEC

SEQ ID NO: 2076 - protein, 213 aa, synthetic construct
DNQLTQSPSFLSASVGDRVTITCRASSSVNYIYWYQQKPGKAPKLLIYYTSNLAMGVPSRFSGSGSGNEYTLTISSLQPEDFATYYCQQFTSSPFTFGQGTKLEIKRTVAAPSVFIFPPSDEQLKSGTASVVCLLNNFYPREAKVQWKVDNALQSGNSQESVTEQDSKDSTYSLSSTLTLSKADYEKHKVYACEVTHQGLSSPVTKSFNRGEC

SEQ ID NO: 2077 - protein, 213 aa, synthetic construct
DNQLTQSPSFLSASVGDRVTITCRASSSVNYIYWYQQKPGKAPKLLIYYTSNLANGVPSRFSGSGSGNEYTLTISSLQPEDFATYYCQQFTSSPFTFGQGTKLEIKRTVAAPSVFIFPPSDEQLKSGTASVVCLLNNFYPREAKVQWKVDNALQSGNSQESVTEQDSKDSTYSLSSTLTLSKADYEKHKVYACEVTHQGLSSPVTKSFNRGEC

SEQ ID NO: 2078 - protein, 213 aa, synthetic construct
DNQLTQSPSFLSASVGDRVTITCRASSSVNYIYWYQQKPGKAPKLLIYYTSNLAQGVPSRFSGSGSGNEYTLTISSLQPEDFATYYCQQFTSSPFTFGQGTKLEIKRTVAAPSVFIFPPSDEQLKSGTASVVCLLNNFYPREAKVQWKVDNALQSGNSQESVTEQDSKDSTYSLSSTLTLSKADYEKHKVYACEVTHQGLSSPVTKSFNRGEC

SEQ ID NO: 2079 - protein, 213 aa, synthetic construct
DNQLTQSPSFLSASVGDRVTITCRASSSVNYIYWYQQKPGKAPKLLIYYTSNLASGVPSRFSGSGSGNEYTLTISSLQPEDFATYYCQQFTSSPFTFGQGTKLEIKRTVAAPSVFIFPPSDEQLKSGTASVVCLLNNFYPREAKVQWKVDNALQSGNSQESVTEQDSKDSTYSLSSTLTLSKADYEKHKVYACEVTHQGLSSPVTKSFNRGEC

SEQ ID NO: 2080 - protein, 213 aa, synthetic construct
DNQLTQSPSFLSASVGDRVTITCRASSSVNYIYWYQQKPGKAPKLLIYYTSNLATGVPSRFSGSGSGNEYTLTISSLQPEDFATYYCQQFTSSPFTFGQGTKLEIKRTVAAPSVFIFPPSDEQLKSGTASVVCLLNNFYPREAKVQWKVDNALQSGNSQESVTEQDSKDSTYSLSSTLTLSKADYEKHKVYACEVTHQGLSSPVTKSFNRGEC

SEQ ID NO: 2081 - protein, 213 aa, synthetic construct
DNQLTQSPSFLSASVGDRVTITCRASSSVNYIYWYQQKPGKAPKLLIYYTSNLAVGVPSRFSGSGSGNEYTLTISSLQPEDFATYYCQQFTSSPFTFGQGTKLEIKRTVAAPSVFIFPPSDEQLKSGTASVVCLLNNFYPREAKVQWKVDNALQSGNSQESVTEQDSKDSTYSLSSTLTLSKADYEKHKVYACEVTHQGLSSPVTKSFNRGEC

SEQ ID NO: 2082 - protein, 213 aa, synthetic construct
DNQLTQSPSFLSASVGDRVTITCRASSSVNYIYWYQQKPGKAPKLLIYYTSNLAWGVPSRFSGSGSGNEYTLTISSLQPEDFATYYCQQFTSSPFTFGQGTKLEIKRTVAAPSVFIFPPSDEQLKSGTASVVCLLNNFYPREAKVQWKVDNALQSGNSQESVTEQDSKDSTYSLSSTLTLSKADYEKHKVYACEVTHQGLSSPVTKSFNRGEC

SEQ ID NO: 2083 - protein, 213 aa, synthetic construct
DNQLTQSPSFLSASVGDRVTITCRASSSVNYIYWYQQKPGKAPKLLIYYTSNLAYGVPSRFSGSGSGNEYTLTISSLQPEDFATYYCQQFTSSPFTFGQGTKLEIKRTVAAPSVFIFPPSDEQLKSGTASVVCLLNNFYPREAKVQWKVDNALQSGNSQESVTEQDSKDSTYSLSSTLTLSKADYEKHKVYACEVTHQGLSSPVTKSFNRGEC

SEQ ID NO: 2084 - protein, 213 aa, synthetic construct
DNQLTQSPSFLSASVGDRVTITCRASSSVNYIYWYQQKPGKAPKLLIYYTSNLAPGVPSRFSGSGSGNEYTLTISSLQPEDFATYYCDQFTSSPFTFGQGTKLEIKRTVAAPSVFIFPPSDEQLKSGTASVVCLLNNFYPREAKVQWKVDNALQSGNSQESVTEQDSKDSTYSLSSTLTLSKADYEKHKVYACEVTHQGLSSPVTKSFNRGEC

SEQ ID NO: 2085 - protein, 213 aa, synthetic construct
DNQLTQSPSFLSASVGDRVTITCRASSSVNYIYWYQQKPGKAPKLLIYYTSNLAPGVPSRFSGSGSGNEYTLTISSLQPEDFATYYCEQFTSSPFTFGQGTKLEIKRTVAAPSVFIFPPSDEQLKSGTASVVCLLNNFYPREAKVQWKVDNALQSGNSQESVTEQDSKDSTYSLSSTLTLSKADYEKHKVYACEVTHQGLSSPVTKSFNRGEC

SEQ ID NO: 2086 - protein, 213 aa, synthetic construct
DNQLTQSPSFLSASVGDRVTITCRASSSVNYIYWYQQKPGKAPKLLIYYTSNLAPGVPSRFSGSGSGNEYTLTISSLQPEDFATYYCFQFTSSPFTFGQGTKLEIKRTVAAPSVFIFPPSDEQLKSGTASVVCLLNNFYPREAKVQWKVDNALQSGNSQESVTEQDSKDSTYSLSSTLTLSKADYEKHKVYACEVTHQGLSSPVTKSFNRGEC

SEQ ID NO: 2087 - protein, 213 aa, synthetic construct
DNQLTQSPSFLSASVGDRVTITCRASSSVNYIYWYQQKPGKAPKLLIYYTSNLAPGVPSRFSGSGSGNEYTLTISSLQPEDFATYYCHQFTSSPFTFGQGTKLEIKRTVAAPSVFIFPPSDEQLKSGTASVVCLLNNFYPREAKVQWKVDNALQSGNSQESVTEQDSKDSTYSLSSTLTLSKADYEKHKVYACEVTHQGLSSPVTKSFNRGEC

SEQ ID NO: 2088 - protein, 213 aa, synthetic construct
DNQLTQSPSFLSASVGDRVTITCRASSSVNYIYWYQQKPGKAPKLLIYYTSNLAPGVPSRFSGSGSGNEYTLTISSLQPEDFATYYCIQFTSSPFTFGQGTKLEIKRTVAAPSVFIFPPSDEQLKSGTASVVCLLNNFYPREAKVQWKVDNALQSGNSQESVTEQDSKDSTYSLSSTLTLSKADYEKHKVYACEVTHQGLSSPVTKSFNRGEC

SEQ ID NO: 2089 - protein, 213 aa, synthetic construct
DNQLTQSPSFLSASVGDRVTITCRASSSVNYIYWYQQKPGKAPKLLIYYTSNLAPGVPSRFSGSGSGNEYTLTISSLQPEDFATYYCLQFTSSPFTFGQGTKLEIKRTVAAPSVFIFPPSDEQLKSGTASVVCLLNNFYPREAKVQWKVDNALQSGNSQESVTEQDSKDSTYSLSSTLTLSKADYEKHKVYACEVTHQGLSSPVTKSFNRGEC

SEQ ID NO: 2090 - protein, 213 aa, synthetic construct
DNQLTQSPSFLSASVGDRVTITCRASSSVNYIYWYQQKPGKAPKLLIYYTSNLAPGVPSRFSGSGSGNEYTLTISSLQPEDFATYYCMQFTSSPFTFGQGTKLEIKRTVAAPSVFIFPPSDEQLKSGTASVVCLLNNFYPREAKVQWKVDNALQSGNSQESVTEQDSKDSTYSLSSTLTLSKADYEKHKVYACEVTHQGLSSPVTKSFNRGEC

SEQ ID NO: 2091 - protein, 213 aa, synthetic construct
DNQLTQSPSFLSASVGDRVTITCRASSSVNYIYWYQQKPGKAPKLLIYYTSNLAPGVPSRFSGSGSGNEYTLTISSLQPEDFATYYCNQFTSSPFTFGQGTKLEIKRTVAAPSVFIFPPSDEQLKSGTASVVCLLNNFYPREAKVQWKVDNALQSGNSQESVTEQDSKDSTYSLSSTLTLSKADYEKHKVYACEVTHQGLSSPVTKSFNRGEC

SEQ ID NO: 2092 - protein, 213 aa, synthetic construct
DNQLTQSPSFLSASVGDRVTITCRASSSVNYIYWYQQKPGKAPKLLIYYTSNLAPGVPSRFSGSGSGNEYTLTISSLQPEDFATYYCPQFTSSPFTFGQGTKLEIKRTVAAPSVFIFPPSDEQLKSGTASVVCLLNNFYPREAKVQWKVDNALQSGNSQESVTEQDSKDSTYSLSSTLTLSKADYEKHKVYACEVTHQGLSSPVTKSFNRGEC

SEQ ID NO: 2093 - protein, 213 aa, synthetic construct
DNQLTQSPSFLSASVGDRVTITCRASSSVNYIYWYQQKPGKAPKLLIYYTSNLAPGVPSRFSGSGSGNEYTLTISSLQPEDFATYYCRQFTSSPFTFGQGTKLEIKRTVAAPSVFIFPPSDEQLKSGTASVVCLLNNFYPREAKVQWKVDNALQSGNSQESVTEQDSKDSTYSLSSTLTLSKADYEKHKVYACEVTHQGLSSPVTKSFNRGEC

SEQ ID NO: 2094 - protein, 213 aa, synthetic construct
DNQLTQSPSFLSASVGDRVTITCRASSSVNYIYWYQQKPGKAPKLLIYYTSNLAPGVPSRFSGSGSGNEYTLTISSLQPEDFATYYCSQFTSSPFTFGQGTKLEIKRTVAAPSVFIFPPSDEQLKSGTASVVCLLNNFYPREAKVQWKVDNALQSGNSQESVTEQDSKDSTYSLSSTLTLSKADYEKHKVYACEVTHQGLSSPVTKSFNRGEC

SEQ ID NO: 2095 - protein, 213 aa, synthetic construct
DNQLTQSPSFLSASVGDRVTITCRASSSVNYIYWYQQKPGKAPKLLIYYTSNLAPGVPSRFSGSGSGNEYTLTISSLQPEDFATYYCTQFTSSPFTFGQGTKLEIKRTVAAPSVFIFPPSDEQLKSGTASVVCLLNNFYPREAKVQWKVDNALQSGNSQESVTEQDSKDSTYSLSSTLTLSKADYEKHKVYACEVTHQGLSSPVTKSFNRGEC

SEQ ID NO: 2096 - protein, 213 aa, synthetic construct
DNQLTQSPSFLSASVGDRVTITCRASSSVNYIYWYQQKPGKAPKLLIYYTSNLAPGVPSRFSGSGSGNEYTLTISSLQPEDFATYYCVQFTSSPFTFGQGTKLEIKRTVAAPSVFIFPPSDEQLKSGTASVVCLLNNFYPREAKVQWKVDNALQSGNSQESVTEQDSKDSTYSLSSTLTLSKADYEKHKVYACEVTHQGLSSPVTKSFNRGEC

SEQ ID NO: 2097 - protein, 213 aa, synthetic construct
DNQLTQSPSFLSASVGDRVTITCRASSSVNYIYWYQQKPGKAPKLLIYYTSNLAPGVPSRFSGSGSGNEYTLTISSLQPEDFATYYCWQFTSSPFTFGQGTKLEIKRTVAAPSVFIFPPSDEQLKSGTASVVCLLNNFYPREAKVQWKVDNALQSGNSQESVTEQDSKDSTYSLSSTLTLSKADYEKHKVYACEVTHQGLSSPVTKSFNRGEC

SEQ ID NO: 2098 - protein, 213 aa, synthetic construct
DNQLTQSPSFLSASVGDRVTITCRASSSVNYIYWYQQKPGKAPKLLIYYTSNLAPGVPSRFSGSGSGNEYTLTISSLQPEDFATYYCYQFTSSPFTFGQGTKLEIKRTVAAPSVFIFPPSDEQLKSGTASVVCLLNNFYPREAKVQWKVDNALQSGNSQESVTEQDSKDSTYSLSSTLTLSKADYEKHKVYACEVTHQGLSSPVTKSFNRGEC

SEQ ID NO: 2099 - protein, 213 aa, synthetic construct
DNQLTQSPSFLSASVGDRVTITCRASSSVNYIYWYQQKPGKAPKLLIYYTSNLAPGVPSRFSGSGSGNEYTLTISSLQPEDFATYYCQAFTSSPFTFGQGTKLEIKRTVAAPSVFIFPPSDEQLKSGTASVVCLLNNFYPREAKVQWKVDNALQSGNSQESVTEQDSKDSTYSLSSTLTLSKADYEKHKVYACEVTHQGLSSPVTKSFNRGEC

SEQ ID NO: 2100 - protein, 213 aa, synthetic construct
DNQLTQSPSFLSASVGDRVTITCRASSSVNYIYWYQQKPGKAPKLLIYYTSNLAPGVPSRFSGSGSGNEYTLTISSLQPEDFATYYCQDFTSSPFTFGQGTKLEIKRTVAAPSVFIFPPSDEQLKSGTASVVCLLNNFYPREAKVQWKVDNALQSGNSQESVTEQDSKDSTYSLSSTLTLSKADYEKHKVYACEVTHQGLSSPVTKSFNRGEC

SEQ ID NO: 2101 - protein, 213 aa, synthetic construct
DNQLTQSPSFLSASVGDRVTITCRASSSVNYIYWYQQKPGKAPKLLIYYTSNLAPGVPSRFSGSGSGNEYTLTISSLQPEDFATYYCQEFTSSPFTFGQGTKLEIKRTVAAPSVFIFPPSDEQLKSGTASVVCLLNNFYPREAKVQWKVDNALQSGNSQESVTEQDSKDSTYSLSSTLTLSKADYEKHKVYACEVTHQGLSSPVTKSFNRGEC

SEQ ID NO: 2102 - protein, 213 aa, synthetic construct
DNQLTQSPSFLSASVGDRVTITCRASSSVNYIYWYQQKPGKAPKLLIYYTSNLAPGVPSRFSGSGSGNEYTLTISSLQPEDFATYYCQFFTSSPFTFGQGTKLEIKRTVAAPSVFIFPPSDEQLKSGTASVVCLLNNFYPREAKVQWKVDNALQSGNSQESVTEQDSKDSTYSLSSTLTLSKADYEKHKVYACEVTHQGLSSPVTKSFNRGEC

SEQ ID NO: 2103 - protein, 213 aa, synthetic construct
DNQLTQSPSFLSASVGDRVTITCRASSSVNYIYWYQQKPGKAPKLLIYYTSNLAPGVPSRFSGSGSGNEYTLTISSLQPEDFATYYCQGFTSSPFTFGQGTKLEIKRTVAAPSVFIFPPSDEQLKSGTASVVCLLNNFYPREAKVQWKVDNALQSGNSQESVTEQDSKDSTYSLSSTLTLSKADYEKHKVYACEVTHQGLSSPVTKSFNRGEC

SEQ ID NO: 2104 - protein, 213 aa, synthetic construct
DNQLTQSPSFLSASVGDRVTITCRASSSVNYIYWYQQKPGKAPKLLIYYTSNLAPGVPSRFSGSGSGNEYTLTISSLQPEDFATYYCQHFTSSPFTFGQGTKLEIKRTVAAPSVFIFPPSDEQLKSGTASVVCLLNNFYPREAKVQWKVDNALQSGNSQESVTEQDSKDSTYSLSSTLTLSKADYEKHKVYACEVTHQGLSSPVTKSFNRGEC

SEQ ID NO: 2105 - protein, 213 aa, synthetic construct
DNQLTQSPSFLSASVGDRVTITCRASSSVNYIYWYQQKPGKAPKLLIYYTSNLAPGVPSRFSGSGSGNEYTLTISSLQPEDFATYYCQIFTSSPFTFGQGTKLEIKRTVAAPSVFIFPPSDEQLKSGTASVVCLLNNFYPREAKVQWKVDNALQSGNSQESVTEQDSKDSTYSLSSTLTLSKADYEKHKVYACEVTHQGLSSPVTKSFNRGEC

SEQ ID NO: 2106 - protein, 213 aa, synthetic construct
DNQLTQSPSFLSASVGDRVTITCRASSSVNYIYWYQQKPGKAPKLLIYYTSNLAPGVPSRFSGSGSGNEYTLTISSLQPEDFATYYCQKFTSSPFTFGQGTKLEIKRTVAAPSVFIFPPSDEQLKSGTASVVCLLNNFYPREAKVQWKVDNALQSGNSQESVTEQDSKDSTYSLSSTLTLSKADYEKHKVYACEVTHQGLSSPVTKSFNRGEC

SEQ ID NO: 2107 - protein, 213 aa, synthetic construct
DNQLTQSPSFLSASVGDRVTITCRASSSVNYIYWYQQKPGKAPKLLIYYTSNLAPGVPSRFSGSGSGNEYTLTISSLQPEDFATYYCQLFTSSPFTFGQGTKLEIKRTVAAPSVFIFPPSDEQLKSGTASVVCLLNNFYPREAKVQWKVDNALQSGNSQESVTEQDSKDSTYSLSSTLTLSKADYEKHKVYACEVTHQGLSSPVTKSFNRGEC

SEQ ID NO: 2108 - protein, 213 aa, synthetic construct
DNQLTQSPSFLSASVGDRVTITCRASSSVNYIYWYQQKPGKAPKLLIYYTSNLAPGVPSRFSGSGSGNEYTLTISSLQPEDFATYYCQMFTSSPFTFGQGTKLEIKRTVAAPSVFIFPPSDEQLKSGTASVVCLLNNFYPREAKVQWKVDNALQSGNSQESVTEQDSKDSTYSLSSTLTLSKADYEKHKVYACEVTHQGLSSPVTKSFNRGEC

SEQ ID NO: 2109 - protein, 213 aa, synthetic construct
DNQLTQSPSFLSASVGDRVTITCRASSSVNYIYWYQQKPGKAPKLLIYYTSNLAPGVPSRFSGSGSGNEYTLTISSLQPEDFATYYCQPFTSSPFTFGQGTKLEIKRTVAAPSVFIFPPSDEQLKSGTASVVCLLNNFYPREAKVQWKVDNALQSGNSQESVTEQDSKDSTYSLSSTLTLSKADYEKHKVYACEVTHQGLSSPVTKSFNRGEC

SEQ ID NO: 2110 - protein, 213 aa, synthetic construct
DNQLTQSPSFLSASVGDRVTITCRASSSVNYIYWYQQKPGKAPKLLIYYTSNLAPGVPSRFSGSGSGNEYTLTISSLQPEDFATYYCQRFTSSPFTFGQGTKLEIKRTVAAPSVFIFPPSDEQLKSGTASVVCLLNNFYPREAKVQWKVDNALQSGNSQESVTEQDSKDSTYSLSSTLTLSKADYEKHKVYACEVTHQGLSSPVTKSFNRGEC

SEQ ID NO: 2111 - protein, 213 aa, synthetic construct
DNQLTQSPSFLSASVGDRVTITCRASSSVNYIYWYQQKPGKAPKLLIYYTSNLAPGVPSRFSGSGSGNEYTLTISSLQPEDFATYYCQSFTSSPFTFGQGTKLEIKRTVAAPSVFIFPPSDEQLKSGTASVVCLLNNFYPREAKVQWKVDNALQSGNSQESVTEQDSKDSTYSLSSTLTLSKADYEKHKVYACEVTHQGLSSPVTKSFNRGEC

SEQ ID NO: 2112 - protein, 213 aa, synthetic construct
DNQLTQSPSFLSASVGDRVTITCRASSSVNYIYWYQQKPGKAPKLLIYYTSNLAPGVPSRFSGSGSGNEYTLTISSLQPEDFATYYCQTFTSSPFTFGQGTKLEIKRTVAAPSVFIFPPSDEQLKSGTASVVCLLNNFYPREAKVQWKVDNALQSGNSQESVTEQDSKDSTYSLSSTLTLSKADYEKHKVYACEVTHQGLSSPVTKSFNRGEC

SEQ ID NO: 2113 - protein, 213 aa, synthetic construct
DNQLTQSPSFLSASVGDRVTITCRASSSVNYIYWYQQKPGKAPKLLIYYTSNLAPGVPSRFSGSGSGNEYTLTISSLQPEDFATYYCQVFTSSPFTFGQGTKLEIKRTVAAPSVFIFPPSDEQLKSGTASVVCLLNNFYPREAKVQWKVDNALQSGNSQESVTEQDSKDSTYSLSSTLTLSKADYEKHKVYACEVTHQGLSSPVTKSFNRGEC

SEQ ID NO: 2114 - protein, 213 aa, synthetic construct
DNQLTQSPSFLSASVGDRVTITCRASSSVNYIYWYQQKPGKAPKLLIYYTSNLAPGVPSRFSGSGSGNEYTLTISSLQPEDFATYYCQYFTSSPFTFGQGTKLEIKRTVAAPSVFIFPPSDEQLKSGTASVVCLLNNFYPREAKVQWKVDNALQSGNSQESVTEQDSKDSTYSLSSTLTLSKADYEKHKVYACEVTHQGLSSPVTKSFNRGEC

SEQ ID NO: 2115 - protein, 213 aa, synthetic construct
DNQLTQSPSFLSASVGDRVTITCRASSSVNYIYWYQQKPGKAPKLLIYYTSNLAPGVPSRFSGSGSGNEYTLTISSLQPEDFATYYCQQATSSPFTFGQGTKLEIKRTVAAPSVFIFPPSDEQLKSGTASVVCLLNNFYPREAKVQWKVDNALQSGNSQESVTEQDSKDSTYSLSSTLTLSKADYEKHKVYACEVTHQGLSSPVTKSFNRGEC

SEQ ID NO: 2116 - protein, 213 aa, synthetic construct
DNQLTQSPSFLSASVGDRVTITCRASSSVNYIYWYQQKPGKAPKLLIYYTSNLAPGVPSRFSGSGSGNEYTLTISSLQPEDFATYYCQQDTSSPFTFGQGTKLEIKRTVAAPSVFIFPPSDEQLKSGTASVVCLLNNFYPREAKVQWKVDNALQSGNSQESVTEQDSKDSTYSLSSTLTLSKADYEKHKVYACEVTHQGLSSPVTKSFNRGEC

SEQ ID NO: 2117 - protein, 213 aa, synthetic construct
DNQLTQSPSFLSASVGDRVTITCRASSSVNYIYWYQQKPGKAPKLLIYYTSNLAPGVPSRFSGSGSGNEYTLTISSLQPEDFATYYCQQETSSPFTFGQGTKLEIKRTVAAPSVFIFPPSDEQLKSGTASVVCLLNNFYPREAKVQWKVDNALQSGNSQESVTEQDSKDSTYSLSSTLTLSKADYEKHKVYACEVTHQGLSSPVTKSFNRGEC

SEQ ID NO: 2118 - protein, 213 aa, synthetic construct
DNQLTQSPSFLSASVGDRVTITCRASSSVNYIYWYQQKPGKAPKLLIYYTSNLAPGVPSRFSGSGSGNEYTLTISSLQPEDFATYYCQQGTSSPFTFGQGTKLEIKRTVAAPSVFIFPPSDEQLKSGTASVVCLLNNFYPREAKVQWKVDNALQSGNSQESVTEQDSKDSTYSLSSTLTLSKADYEKHKVYACEVTHQGLSSPVTKSFNRGEC

SEQ ID NO: 2119 - protein, 213 aa, synthetic construct
DNQLTQSPSFLSASVGDRVTITCRASSSVNYIYWYQQKPGKAPKLLIYYTSNLAPGVPSRFSGSGSGNEYTLTISSLQPEDFATYYCQQHTSSPFTFGQGTKLEIKRTVAAPSVFIFPPSDEQLKSGTASVVCLLNNFYPREAKVQWKVDNALQSGNSQESVTEQDSKDSTYSLSSTLTLSKADYEKHKVYACEVTHQGLSSPVTKSFNRGEC

SEQ ID NO: 2120 - protein, 213 aa, synthetic construct
DNQLTQSPSFLSASVGDRVTITCRASSSVNYIYWYQQKPGKAPKLLIYYTSNLAPGVPSRFSGSGSGNEYTLTISSLQPEDFATYYCQQITSSPFTFGQGTKLEIKRTVAAPSVFIFPPSDEQLKSGTASVVCLLNNFYPREAKVQWKVDNALQSGNSQESVTEQDSKDSTYSLSSTLTLSKADYEKHKVYACEVTHQGLSSPVTKSFNRGEC

SEQ ID NO: 2121 - protein, 213 aa, synthetic construct
DNQLTQSPSFLSASVGDRVTITCRASSSVNYIYWYQQKPGKAPKLLIYYTSNLAPGVPSRFSGSGSGNEYTLTISSLQPEDFATYYCQQKTSSPFTFGQGTKLEIKRTVAAPSVFIFPPSDEQLKSGTASVVCLLNNFYPREAKVQWKVDNALQSGNSQESVTEQDSKDSTYSLSSTLTLSKADYEKHKVYACEVTHQGLSSPVTKSFNRGEC

SEQ ID NO: 2122 - protein, 213 aa, synthetic construct
DNQLTQSPSFLSASVGDRVTITCRASSSVNYIYWYQQKPGKAPKLLIYYTSNLAPGVPSRFSGSGSGNEYTLTISSLQPEDFATYYCQQLTSSPFTFGQGTKLEIKRTVAAPSVFIFPPSDEQLKSGTASVVCLLNNFYPREAKVQWKVDNALQSGNSQESVTEQDSKDSTYSLSSTLTLSKADYEKHKVYACEVTHQGLSSPVTKSFNRGEC

SEQ ID NO: 2123 - protein, 213 aa, synthetic construct
DNQLTQSPSFLSASVGDRVTITCRASSSVNYIYWYQQKPGKAPKLLIYYTSNLAPGVPSRFSGSGSGNEYTLTISSLQPEDFATYYCQQMTSSPFTFGQGTKLEIKRTVAAPSVFIFPPSDEQLKSGTASVVCLLNNFYPREAKVQWKVDNALQSGNSQESVTEQDSKDSTYSLSSTLTLSKADYEKHKVYACEVTHQGLSSPVTKSFNRGEC

SEQ ID NO: 2124 - protein, 213 aa, synthetic construct
DNQLTQSPSFLSASVGDRVTITCRASSSVNYIYWYQQKPGKAPKLLIYYTSNLAPGVPSRFSGSGSGNEYTLTISSLQPEDFATYYCQQNTSSPFTFGQGTKLEIKRTVAAPSVFIFPPSDEQLKSGTASVVCLLNNFYPREAKVQWKVDNALQSGNSQESVTEQDSKDSTYSLSSTLTLSKADYEKHKVYACEVTHQGLSSPVTKSFNRGEC

SEQ ID NO: 2125 - protein, 213 aa, synthetic construct
DNQLTQSPSFLSASVGDRVTITCRASSSVNYIYWYQQKPGKAPKLLIYYTSNLAPGVPSRFSGSGSGNEYTLTISSLQPEDFATYYCQQPTSSPFTFGQGTKLEIKRTVAAPSVFIFPPSDEQLKSGTASVVCLLNNFYPREAKVQWKVDNALQSGNSQESVTEQDSKDSTYSLSSTLTLSKADYEKHKVYACEVTHQGLSSPVTKSFNRGEC

SEQ ID NO: 2126 - protein, 213 aa, synthetic construct
DNQLTQSPSFLSASVGDRVTITCRASSSVNYIYWYQQKPGKAPKLLIYYTSNLAPGVPSRFSGSGSGNEYTLTISSLQPEDFATYYCQQQTSSPFTFGQGTKLEIKRTVAAPSVFIFPPSDEQLKSGTASVVCLLNNFYPREAKVQWKVDNALQSGNSQESVTEQDSKDSTYSLSSTLTLSKADYEKHKVYACEVTHQGLSSPVTKSFNRGEC

SEQ ID NO: 2127 - protein, 213 aa, synthetic construct
DNQLTQSPSFLSASVGDRVTITCRASSSVNYIYWYQQKPGKAPKLLIYYTSNLAPGVPSRFSGSGSGNEYTLTISSLQPEDFATYYCQQRTSSPFTFGQGTKLEIKRTVAAPSVFIFPPSDEQLKSGTASVVCLLNNFYPREAKVQWKVDNALQSGNSQESVTEQDSKDSTYSLSSTLTLSKADYEKHKVYACEVTHQGLSSPVTKSFNRGEC

SEQ ID NO: 2128 - protein, 213 aa, synthetic construct
DNQLTQSPSFLSASVGDRVTITCRASSSVNYIYWYQQKPGKAPKLLIYYTSNLAPGVPSRFSGSGSGNEYTLTISSLQPEDFATYYCQQSTSSPFTFGQGTKLEIKRTVAAPSVFIFPPSDEQLKSGTASVVCLLNNFYPREAKVQWKVDNALQSGNSQESVTEQDSKDSTYSLSSTLTLSKADYEKHKVYACEVTHQGLSSPVTKSFNRGEC

SEQ ID NO: 2129 - protein, 213 aa, synthetic construct
DNQLTQSPSFLSASVGDRVTITCRASSSVNYIYWYQQKPGKAPKLLIYYTSNLAPGVPSRFSGSGSGNEYTLTISSLQPEDFATYYCQQTTSSPFTFGQGTKLEIKRTVAAPSVFIFPPSDEQLKSGTASVVCLLNNFYPREAKVQWKVDNALQSGNSQESVTEQDSKDSTYSLSSTLTLSKADYEKHKVYACEVTHQGLSSPVTKSFNRGEC

SEQ ID NO: 2130 - protein, 213 aa, synthetic construct
DNQLTQSPSFLSASVGDRVTITCRASSSVNYIYWYQQKPGKAPKLLIYYTSNLAPGVPSRFSGSGSGNEYTLTISSLQPEDFATYYCQQVTSSPFTFGQGTKLEIKRTVAAPSVFIFPPSDEQLKSGTASVVCLLNNFYPREAKVQWKVDNALQSGNSQESVTEQDSKDSTYSLSSTLTLSKADYEKHKVYACEVTHQGLSSPVTKSFNRGEC

SEQ ID NO: 2131 - protein, 213 aa, synthetic construct
DNQLTQSPSFLSASVGDRVTITCRASSSVNYIYWYQQKPGKAPKLLIYYTSNLAPGVPSRFSGSGSGNEYTLTISSLQPEDFATYYCQQWTSSPFTFGQGTKLEIKRTVAAPSVFIFPPSDEQLKSGTASVVCLLNNFYPREAKVQWKVDNALQSGNSQESVTEQDSKDSTYSLSSTLTLSKADYEKHKVYACEVTHQGLSSPVTKSFNRGEC

SEQ ID NO: 2132 - protein, 213 aa, synthetic construct
DNQLTQSPSFLSASVGDRVTITCRASSSVNYIYWYQQKPGKAPKLLIYYTSNLAPGVPSRFSGSGSGNEYTLTISSLQPEDFATYYCQQYTSSPFTFGQGTKLEIKRTVAAPSVFIFPPSDEQLKSGTASVVCLLNNFYPREAKVQWKVDNALQSGNSQESVTEQDSKDSTYSLSSTLTLSKADYEKHKVYACEVTHQGLSSPVTKSFNRGEC

SEQ ID NO: 2133 - protein, 213 aa, synthetic construct
DNQLTQSPSFLSASVGDRVTITCRASSSVNYIYWYQQKPGKAPKLLIYYTSNLAPGVPSRFSGSGSGNEYTLTISSLQPEDFATYYCQQFASSPFTFGQGTKLEIKRTVAAPSVFIFPPSDEQLKSGTASVVCLLNNFYPREAKVQWKVDNALQSGNSQESVTEQDSKDSTYSLSSTLTLSKADYEKHKVYACEVTHQGLSSPVTKSFNRGEC

SEQ ID NO: 2134 - protein, 213 aa, synthetic construct
DNQLTQSPSFLSASVGDRVTITCRASSSVNYIYWYQQKPGKAPKLLIYYTSNLAPGVPSRFSGSGSGNEYTLTISSLQPEDFATYYCQQFDSSPFTFGQGTKLEIKRTVAAPSVFIFPPSDEQLKSGTASVVCLLNNFYPREAKVQWKVDNALQSGNSQESVTEQDSKDSTYSLSSTLTLSKADYEKHKVYACEVTHQGLSSPVTKSFNRGEC

SEQ ID NO: 2135 - protein, 213 aa, synthetic construct
DNQLTQSPSFLSASVGDRVTITCRASSSVNYIYWYQQKPGKAPKLLIYYTSNLAPGVPSRFSGSGSGNEYTLTISSLQPEDFATYYCQQFESSPFTFGQGTKLEIKRTVAAPSVFIFPPSDEQLKSGTASVVCLLNNFYPREAKVQWKVDNALQSGNSQESVTEQDSKDSTYSLSSTLTLSKADYEKHKVYACEVTHQGLSSPVTKSFNRGEC

SEQ ID NO: 2136 - protein, 213 aa, synthetic construct
DNQLTQSPSFLSASVGDRVTITCRASSSVNYIYWYQQKPGKAPKLLIYYTSNLAPGVPSRFSGSGSGNEYTLTISSLQPEDFATYYCQQFFSSPFTFGQGTKLEIKRTVAAPSVFIFPPSDEQLKSGTASVVCLLNNFYPREAKVQWKVDNALQSGNSQESVTEQDSKDSTYSLSSTLTLSKADYEKHKVYACEVTHQGLSSPVTKSFNRGEC

SEQ ID NO: 2137 - protein, 213 aa, synthetic construct
DNQLTQSPSFLSASVGDRVTITCRASSSVNYIYWYQQKPGKAPKLLIYYTSNLAPGVPSRFSGSGSGNEYTLTISSLQPEDFATYYCQQFGSSPFTFGQGTKLEIKRTVAAPSVFIFPPSDEQLKSGTASVVCLLNNFYPREAKVQWKVDNALQSGNSQESVTEQDSKDSTYSLSSTLTLSKADYEKHKVYACEVTHQGLSSPVTKSFNRGEC

SEQ ID NO: 2138 - protein, 213 aa, synthetic construct
DNQLTQSPSFLSASVGDRVTITCRASSSVNYIYWYQQKPGKAPKLLIYYTSNLAPGVPSRFSGSGSGNEYTLTISSLQPEDFATYYCQQFHSSPFTFGQGTKLEIKRTVAAPSVFIFPPSDEQLKSGTASVVCLLNNFYPREAKVQWKVDNALQSGNSQESVTEQDSKDSTYSLSSTLTLSKADYEKHKVYACEVTHQGLSSPVTKSFNRGEC

SEQ ID NO: 2139 - protein, 213 aa, synthetic construct
DNQLTQSPSFLSASVGDRVTITCRASSSVNYIYWYQQKPGKAPKLLIYYTSNLAPGVPSRFSGSGSGNEYTLTISSLQPEDFATYYCQQFISSPFTFGQGTKLEIKRTVAAPSVFIFPPSDEQLKSGTASVVCLLNNFYPREAKVQWKVDNALQSGNSQESVTEQDSKDSTYSLSSTLTLSKADYEKHKVYACEVTHQGLSSPVTKSFNRGEC

SEQ ID NO: 2140 - protein, 213 aa, synthetic construct
DNQLTQSPSFLSASVGDRVTITCRASSSVNYIYWYQQKPGKAPKLLIYYTSNLAPGVPSRFSGSGSGNEYTLTISSLQPEDFATYYCQQFKSSPFTFGQGTKLEIKRTVAAPSVFIFPPSDEQLKSGTASVVCLLNNFYPREAKVQWKVDNALQSGNSQESVTEQDSKDSTYSLSSTLTLSKADYEKHKVYACEVTHQGLSSPVTKSFNRGEC

SEQ ID NO: 2141 - protein, 213 aa, synthetic construct
DNQLTQSPSFLSASVGDRVTITCRASSSVNYIYWYQQKPGKAPKLLIYYTSNLAPGVPSRFSGSGSGNEYTLTISSLQPEDFATYYCQQFLSSPFTFGQGTKLEIKRTVAAPSVFIFPPSDEQLKSGTASVVCLLNNFYPREAKVQWKVDNALQSGNSQESVTEQDSKDSTYSLSSTLTLSKADYEKHKVYACEVTHQGLSSPVTKSFNRGEC

SEQ ID NO: 2142 - protein, 213 aa, synthetic construct
DNQLTQSPSFLSASVGDRVTITCRASSSVNYIYWYQQKPGKAPKLLIYYTSNLAPGVPSRFSGSGSGNEYTLTISSLQPEDFATYYCQQFMSSPFTFGQGTKLEIKRTVAAPSVFIFPPSDEQLKSGTASVVCLLNNFYPREAKVQWKVDNALQSGNSQESVTEQDSKDSTYSLSSTLTLSKADYEKHKVYACEVTHQGLSSPVTKSFNRGEC

SEQ ID NO: 2143 - protein, 213 aa, synthetic construct
DNQLTQSPSFLSASVGDRVTITCRASSSVNYIYWYQQKPGKAPKLLIYYTSNLAPGVPSRFSGSGSGNEYTLTISSLQPEDFATYYCQQFNSSPFTFGQGTKLEIKRTVAAPSVFIFPPSDEQLKSGTASVVCLLNNFYPREAKVQWKVDNALQSGNSQESVTEQDSKDSTYSLSSTLTLSKADYEKHKVYACEVTHQGLSSPVTKSFNRGEC

SEQ ID NO: 2144 - protein, 213 aa, synthetic construct
DNQLTQSPSFLSASVGDRVTITCRASSSVNYIYWYQQKPGKAPKLLIYYTSNLAPGVPSRFSGSGSGNEYTLTISSLQPEDFATYYCQQFPSSPFTFGQGTKLEIKRTVAAPSVFIFPPSDEQLKSGTASVVCLLNNFYPREAKVQWKVDNALQSGNSQESVTEQDSKDSTYSLSSTLTLSKADYEKHKVYACEVTHQGLSSPVTKSFNRGEC

SEQ ID NO: 2145 - protein, 213 aa, synthetic construct
DNQLTQSPSFLSASVGDRVTITCRASSSVNYIYWYQQKPGKAPKLLIYYTSNLAPGVPSRFSGSGSGNEYTLTISSLQPEDFATYYCQQFQSSPFTFGQGTKLEIKRTVAAPSVFIFPPSDEQLKSGTASVVCLLNNFYPREAKVQWKVDNALQSGNSQESVTEQDSKDSTYSLSSTLTLSKADYEKHKVYACEVTHQGLSSPVTKSFNRGEC

SEQ ID NO: 2146 - protein, 213 aa, synthetic construct
DNQLTQSPSFLSASVGDRVTITCRASSSVNYIYWYQQKPGKAPKLLIYYTSNLAPGVPSRFSGSGSGNEYTLTISSLQPEDFATYYCQQFRSSPFTFGQGTKLEIKRTVAAPSVFIFPPSDEQLKSGTASVVCLLNNFYPREAKVQWKVDNALQSGNSQESVTEQDSKDSTYSLSSTLTLSKADYEKHKVYACEVTHQGLSSPVTKSFNRGEC

SEQ ID NO: 2147 - protein, 213 aa, synthetic construct
DNQLTQSPSFLSASVGDRVTITCRASSSVNYIYWYQQKPGKAPKLLIYYTSNLAPGVPSRFSGSGSGNEYTLTISSLQPEDFATYYCQQFSSSPFTFGQGTKLEIKRTVAAPSVFIFPPSDEQLKSGTASVVCLLNNFYPREAKVQWKVDNALQSGNSQESVTEQDSKDSTYSLSSTLTLSKADYEKHKVYACEVTHQGLSSPVTKSFNRGEC

SEQ ID NO: 2148 - protein, 213 aa, synthetic construct
DNQLTQSPSFLSASVGDRVTITCRASSSVNYIYWYQQKPGKAPKLLIYYTSNLAPGVPSRFSGSGSGNEYTLTISSLQPEDFATYYCQQFVSSPFTFGQGTKLEIKRTVAAPSVFIFPPSDEQLKSGTASVVCLLNNFYPREAKVQWKVDNALQSGNSQESVTEQDSKDSTYSLSSTLTLSKADYEKHKVYACEVTHQGLSSPVTKSFNRGEC

SEQ ID NO: 2149 - protein, 213 aa, synthetic construct
DNQLTQSPSFLSASVGDRVTITCRASSSVNYIYWYQQKPGKAPKLLIYYTSNLAPGVPSRFSGSGSGNEYTLTISSLQPEDFATYYCQQFWSSPFTFGQGTKLEIKRTVAAPSVFIFPPSDEQLKSGTASVVCLLNNFYPREAKVQWKVDNALQSGNSQESVTEQDSKDSTYSLSSTLTLSKADYEKHKVYACEVTHQGLSSPVTKSFNRGEC

SEQ ID NO: 2150 - protein, 213 aa, synthetic construct
DNQLTQSPSFLSASVGDRVTITCRASSSVNYIYWYQQKPGKAPKLLIYYTSNLAPGVPSRFSGSGSGNEYTLTISSLQPEDFATYYCQQFYSSPFTFGQGTKLEIKRTVAAPSVFIFPPSDEQLKSGTASVVCLLNNFYPREAKVQWKVDNALQSGNSQESVTEQDSKDSTYSLSSTLTLSKADYEKHKVYACEVTHQGLSSPVTKSFNRGEC

SEQ ID NO: 2151 - protein, 213 aa, synthetic construct
DNQLTQSPSFLSASVGDRVTITCRASSSVNYIYWYQQKPGKAPKLLIYYTSNLAPGVPSRFSGSGSGNEYTLTISSLQPEDFATYYCQQFTASPFTFGQGTKLEIKRTVAAPSVFIFPPSDEQLKSGTASVVCLLNNFYPREAKVQWKVDNALQSGNSQESVTEQDSKDSTYSLSSTLTLSKADYEKHKVYACEVTHQGLSSPVTKSFNRGEC

SEQ ID NO: 2152 - protein, 213 aa, synthetic construct
DNQLTQSPSFLSASVGDRVTITCRASSSVNYIYWYQQKPGKAPKLLIYYTSNLAPGVPSRFSGSGSGNEYTLTISSLQPEDFATYYCQQFTDSPFTFGQGTKLEIKRTVAAPSVFIFPPSDEQLKSGTASVVCLLNNFYPREAKVQWKVDNALQSGNSQESVTEQDSKDSTYSLSSTLTLSKADYEKHKVYACEVTHQGLSSPVTKSFNRGEC

SEQ ID NO: 2153 - protein, 213 aa, synthetic construct
DNQLTQSPSFLSASVGDRVTITCRASSSVNYIYWYQQKPGKAPKLLIYYTSNLAPGVPSRFSGSGSGNEYTLTISSLQPEDFATYYCQQFTESPFTFGQGTKLEIKRTVAAPSVFIFPPSDEQLKSGTASVVCLLNNFYPREAKVQWKVDNALQSGNSQESVTEQDSKDSTYSLSSTLTLSKADYEKHKVYACEVTHQGLSSPVTKSFNRGEC

SEQ ID NO: 2154 - protein, 213 aa, synthetic construct
DNQLTQSPSFLSASVGDRVTITCRASSSVNYIYWYQQKPGKAPKLLIYYTSNLAPGVPSRFSGSGSGNEYTLTISSLQPEDFATYYCQQFTFSPFTFGQGTKLEIKRTVAAPSVFIFPPSDEQLKSGTASVVCLLNNFYPREAKVQWKVDNALQSGNSQESVTEQDSKDSTYSLSSTLTLSKADYEKHKVYACEVTHQGLSSPVTKSFNRGEC

SEQ ID NO: 2155 - protein, 213 aa, synthetic construct
DNQLTQSPSFLSASVGDRVTITCRASSSVNYIYWYQQKPGKAPKLLIYYTSNLAPGVPSRFSGSGSGNEYTLTISSLQPEDFATYYCQQFTGSPFTFGQGTKLEIKRTVAAPSVFIFPPSDEQLKSGTASVVCLLNNFYPREAKVQWKVDNALQSGNSQESVTEQDSKDSTYSLSSTLTLSKADYEKHKVYACEVTHQGLSSPVTKSFNRGEC

SEQ ID NO: 2156 - protein, 213 aa, synthetic construct
DNQLTQSPSFLSASVGDRVTITCRASSSVNYIYWYQQKPGKAPKLLIYYTSNLAPGVPSRFSGSGSGNEYTLTISSLQPEDFATYYCQQFTHSPFTFGQGTKLEIKRTVAAPSVFIFPPSDEQLKSGTASVVCLLNNFYPREAKVQWKVDNALQSGNSQESVTEQDSKDSTYSLSSTLTLSKADYEKHKVYACEVTHQGLSSPVTKSFNRGEC

SEQ ID NO: 2157 - protein, 213 aa, synthetic construct
DNQLTQSPSFLSASVGDRVTITCRASSSVNYIYWYQQKPGKAPKLLIYYTSNLAPGVPSRFSGSGSGNEYTLTISSLQPEDFATYYCQQFTISPFTFGQGTKLEIKRTVAAPSVFIFPPSDEQLKSGTASVVCLLNNFYPREAKVQWKVDNALQSGNSQESVTEQDSKDSTYSLSSTLTLSKADYEKHKVYACEVTHQGLSSPVTKSFNRGEC

SEQ ID NO: 2158 - protein, 213 aa, synthetic construct
DNQLTQSPSFLSASVGDRVTITCRASSSVNYIYWYQQKPGKAPKLLIYYTSNLAPGVPSRFSGSGSGNEYTLTISSLQPEDFATYYCQQFTKSPFTFGQGTKLEIKRTVAAPSVFIFPPSDEQLKSGTASVVCLLNNFYPREAKVQWKVDNALQSGNSQESVTEQDSKDSTYSLSSTLTLSKADYEKHKVYACEVTHQGLSSPVTKSFNRGEC

SEQ ID NO: 2159 - protein, 213 aa, synthetic construct
DNQLTQSPSFLSASVGDRVTITCRASSSVNYIYWYQQKPGKAPKLLIYYTSNLAPGVPSRFSGSGSGNEYTLTISSLQPEDFATYYCQQFTLSPFTFGQGTKLEIKRTVAAPSVFIFPPSDEQLKSGTASVVCLLNNFYPREAKVQWKVDNALQSGNSQESVTEQDSKDSTYSLSSTLTLSKADYEKHKVYACEVTHQGLSSPVTKSFNRGEC

SEQ ID NO: 2160 - protein, 213 aa, synthetic construct
DNQLTQSPSFLSASVGDRVTITCRASSSVNYIYWYQQKPGKAPKLLIYYTSNLAPGVPSRFSGSGSGNEYTLTISSLQPEDFATYYCQQFTMSPFTFGQGTKLEIKRTVAAPSVFIFPPSDEQLKSGTASVVCLLNNFYPREAKVQWKVDNALQSGNSQESVTEQDSKDSTYSLSSTLTLSKADYEKHKVYACEVTHQGLSSPVTKSFNRGEC

SEQ ID NO: 2161 - protein, 213 aa, synthetic construct
DNQLTQSPSFLSASVGDRVTITCRASSSVNYIYWYQQKPGKAPKLLIYYTSNLAPGVPSRFSGSGSGNEYTLTISSLQPEDFATYYCQQFTNSPFTFGQGTKLEIKRTVAAPSVFIFPPSDEQLKSGTASVVCLLNNFYPREAKVQWKVDNALQSGNSQESVTEQDSKDSTYSLSSTLTLSKADYEKHKVYACEVTHQGLSSPVTKSFNRGEC

SEQ ID NO: 2162 - protein, 213 aa, synthetic construct
DNQLTQSPSFLSASVGDRVTITCRASSSVNYIYWYQQKPGKAPKLLIYYTSNLAPGVPSRFSGSGSGNEYTLTISSLQPEDFATYYCQQFTPSPFTFGQGTKLEIKRTVAAPSVFIFPPSDEQLKSGTASVVCLLNNFYPREAKVQWKVDNALQSGNSQESVTEQDSKDSTYSLSSTLTLSKADYEKHKVYACEVTHQGLSSPVTKSFNRGEC

SEQ ID NO: 2163 - protein, 213 aa, synthetic construct
DNQLTQSPSFLSASVGDRVTITCRASSSVNYIYWYQQKPGKAPKLLIYYTSNLAPGVPSRFSGSGSGNEYTLTISSLQPEDFATYYCQQFTQSPFTFGQGTKLEIKRTVAAPSVFIFPPSDEQLKSGTASVVCLLNNFYPREAKVQWKVDNALQSGNSQESVTEQDSKDSTYSLSSTLTLSKADYEKHKVYACEVTHQGLSSPVTKSFNRGEC

SEQ ID NO: 2164 - protein, 213 aa, synthetic construct
DNQLTQSPSFLSASVGDRVTITCRASSSVNYIYWYQQKPGKAPKLLIYYTSNLAPGVPSRFSGSGSGNEYTLTISSLQPEDFATYYCQQFTRSPFTFGQGTKLEIKRTVAAPSVFIFPPSDEQLKSGTASVVCLLNNFYPREAKVQWKVDNALQSGNSQESVTEQDSKDSTYSLSSTLTLSKADYEKHKVYACEVTHQGLSSPVTKSFNRGEC

SEQ ID NO: 2165 - protein, 213 aa, synthetic construct
DNQLTQSPSFLSASVGDRVTITCRASSSVNYIYWYQQKPGKAPKLLIYYTSNLAPGVPSRFSGSGSGNEYTLTISSLQPEDFATYYCQQFTTSPFTFGQGTKLEIKRTVAAPSVFIFPPSDEQLKSGTASVVCLLNNFYPREAKVQWKVDNALQSGNSQESVTEQDSKDSTYSLSSTLTLSKADYEKHKVYACEVTHQGLSSPVTKSFNRGEC

SEQ ID NO: 2166 - protein, 213 aa, synthetic construct
DNQLTQSPSFLSASVGDRVTITCRASSSVNYIYWYQQKPGKAPKLLIYYTSNLAPGVPSRFSGSGSGNEYTLTISSLQPEDFATYYCQQFTVSPFTFGQGTKLEIKRTVAAPSVFIFPPSDEQLKSGTASVVCLLNNFYPREAKVQWKVDNALQSGNSQESVTEQDSKDSTYSLSSTLTLSKADYEKHKVYACEVTHQGLSSPVTKSFNRGEC

SEQ ID NO: 2167 - protein, 213 aa, synthetic construct
DNQLTQSPSFLSASVGDRVTITCRASSSVNYIYWYQQKPGKAPKLLIYYTSNLAPGVPSRFSGSGSGNEYTLTISSLQPEDFATYYCQQFTWSPFTFGQGTKLEIKRTVAAPSVFIFPPSDEQLKSGTASVVCLLNNFYPREAKVQWKVDNALQSGNSQESVTEQDSKDSTYSLSSTLTLSKADYEKHKVYACEVTHQGLSSPVTKSFNRGEC

SEQ ID NO: 2168 - protein, 213 aa, synthetic construct
DNQLTQSPSFLSASVGDRVTITCRASSSVNYIYWYQQKPGKAPKLLIYYTSNLAPGVPSRFSGSGSGNEYTLTISSLQPEDFATYYCQQFTYSPFTFGQGTKLEIKRTVAAPSVFIFPPSDEQLKSGTASVVCLLNNFYPREAKVQWKVDNALQSGNSQESVTEQDSKDSTYSLSSTLTLSKADYEKHKVYACEVTHQGLSSPVTKSFNRGEC

SEQ ID NO: 2169 - protein, 213 aa, synthetic construct
DNQLTQSPSFLSASVGDRVTITCRASSSVNYIYWYQQKPGKAPKLLIYYTSNLAPGVPSRFSGSGSGNEYTLTISSLQPEDFATYYCQQFTSAPFTFGQGTKLEIKRTVAAPSVFIFPPSDEQLKSGTASVVCLLNNFYPREAKVQWKVDNALQSGNSQESVTEQDSKDSTYSLSSTLTLSKADYEKHKVYACEVTHQGLSSPVTKSFNRGEC

SEQ ID NO: 2170 - protein, 213 aa, synthetic construct
DNQLTQSPSFLSASVGDRVTITCRASSSVNYIYWYQQKPGKAPKLLIYYTSNLAPGVPSRFSGSGSGNEYTLTISSLQPEDFATYYCQQFTSDPFTFGQGTKLEIKRTVAAPSVFIFPPSDEQLKSGTASVVCLLNNFYPREAKVQWKVDNALQSGNSQESVTEQDSKDSTYSLSSTLTLSKADYEKHKVYACEVTHQGLSSPVTKSFNRGEC

SEQ ID NO: 2171 - protein, 213 aa, synthetic construct
DNQLTQSPSFLSASVGDRVTITCRASSSVNYIYWYQQKPGKAPKLLIYYTSNLAPGVPSRFSGSGSGNEYTLTISSLQPEDFATYYCQQFTSEPFTFGQGTKLEIKRTVAAPSVFIFPPSDEQLKSGTASVVCLLNNFYPREAKVQWKVDNALQSGNSQESVTEQDSKDSTYSLSSTLTLSKADYEKHKVYACEVTHQGLSSPVTKSFNRGEC

SEQ ID NO: 2172 - protein, 213 aa, synthetic construct
DNQLTQSPSFLSASVGDRVTITCRASSSVNYIYWYQQKPGKAPKLLIYYTSNLAPGVPSRFSGSGSGNEYTLTISSLQPEDFATYYCQQFTSFPFTFGQGTKLEIKRTVAAPSVFIFPPSDEQLKSGTASVVCLLNNFYPREAKVQWKVDNALQSGNSQESVTEQDSKDSTYSLSSTLTLSKADYEKHKVYACEVTHQGLSSPVTKSFNRGEC

SEQ ID NO: 2173 - protein, 213 aa, synthetic construct
DNQLTQSPSFLSASVGDRVTITCRASSSVNYIYWYQQKPGKAPKLLIYYTSNLAPGVPSRFSGSGSGNEYTLTISSLQPEDFATYYCQQFTSGPFTFGQGTKLEIKRTVAAPSVFIFPPSDEQLKSGTASVVCLLNNFYPREAKVQWKVDNALQSGNSQESVTEQDSKDSTYSLSSTLTLSKADYEKHKVYACEVTHQGLSSPVTKSFNRGEC

SEQ ID NO: 2174 - protein, 213 aa, synthetic construct
DNQLTQSPSFLSASVGDRVTITCRASSSVNYIYWYQQKPGKAPKLLIYYTSNLAPGVPSRFSGSGSGNEYTLTISSLQPEDFATYYCQQFTSHPFTFGQGTKLEIKRTVAAPSVFIFPPSDEQLKSGTASVVCLLNNFYPREAKVQWKVDNALQSGNSQESVTEQDSKDSTYSLSSTLTLSKADYEKHKVYACEVTHQGLSSPVTKSFNRGEC

SEQ ID NO: 2175 - protein, 213 aa, synthetic construct
DNQLTQSPSFLSASVGDRVTITCRASSSVNYIYWYQQKPGKAPKLLIYYTSNLAPGVPSRFSGSGSGNEYTLTISSLQPEDFATYYCQQFTSKPFTFGQGTKLEIKRTVAAPSVFIFPPSDEQLKSGTASVVCLLNNFYPREAKVQWKVDNALQSGNSQESVTEQDSKDSTYSLSSTLTLSKADYEKHKVYACEVTHQGLSSPVTKSFNRGEC

SEQ ID NO: 2176 - protein, 213 aa, synthetic construct
DNQLTQSPSFLSASVGDRVTITCRASSSVNYIYWYQQKPGKAPKLLIYYTSNLAPGVPSRFSGSGSGNEYTLTISSLQPEDFATYYCQQFTSLPFTFGQGTKLEIKRTVAAPSVFIFPPSDEQLKSGTASVVCLLNNFYPREAKVQWKVDNALQSGNSQESVTEQDSKDSTYSLSSTLTLSKADYEKHKVYACEVTHQGLSSPVTKSFNRGEC

SEQ ID NO: 2177 - protein, 213 aa, synthetic construct
DNQLTQSPSFLSASVGDRVTITCRASSSVNYIYWYQQKPGKAPKLLIYYTSNLAPGVPSRFSGSGSGNEYTLTISSLQPEDFATYYCQQFTSMPFTFGQGTKLEIKRTVAAPSVFIFPPSDEQLKSGTASVVCLLNNFYPREAKVQWKVDNALQSGNSQESVTEQDSKDSTYSLSSTLTLSKADYEKHKVYACEVTHQGLSSPVTKSFNRGEC

SEQ ID NO: 2178 - protein, 213 aa, synthetic construct
DNQLTQSPSFLSASVGDRVTITCRASSSVNYIYWYQQKPGKAPKLLIYYTSNLAPGVPSRFSGSGSGNEYTLTISSLQPEDFATYYCQQFTSNPFTFGQGTKLEIKRTVAAPSVFIFPPSDEQLKSGTASVVCLLNNFYPREAKVQWKVDNALQSGNSQESVTEQDSKDSTYSLSSTLTLSKADYEKHKVYACEVTHQGLSSPVTKSFNRGEC

SEQ ID NO: 2179 - protein, 213 aa, synthetic construct
DNQLTQSPSFLSASVGDRVTITCRASSSVNYIYWYQQKPGKAPKLLIYYTSNLAPGVPSRFSGSGSGNEYTLTISSLQPEDFATYYCQQFTSPPFTFGQGTKLEIKRTVAAPSVFIFPPSDEQLKSGTASVVCLLNNFYPREAKVQWKVDNALQSGNSQESVTEQDSKDSTYSLSSTLTLSKADYEKHKVYACEVTHQGLSSPVTKSFNRGEC

SEQ ID NO: 2180 - protein, 213 aa, synthetic construct
DNQLTQSPSFLSASVGDRVTITCRASSSVNYIYWYQQKPGKAPKLLIYYTSNLAPGVPSRFSGSGSGNEYTLTISSLQPEDFATYYCQQFTSQPFTFGQGTKLEIKRTVAAPSVFIFPPSDEQLKSGTASVVCLLNNFYPREAKVQWKVDNALQSGNSQESVTEQDSKDSTYSLSSTLTLSKADYEKHKVYACEVTHQGLSSPVTKSFNRGEC

SEQ ID NO: 2181 - protein, 213 aa, synthetic construct
DNQLTQSPSFLSASVGDRVTITCRASSSVNYIYWYQQKPGKAPKLLIYYTSNLAPGVPSRFSGSGSGNEYTLTISSLQPEDFATYYCQQFTSRPFTFGQGTKLEIKRTVAAPSVFIFPPSDEQLKSGTASVVCLLNNFYPREAKVQWKVDNALQSGNSQESVTEQDSKDSTYSLSSTLTLSKADYEKHKVYACEVTHQGLSSPVTKSFNRGEC

SEQ ID NO: 2182 - protein, 213 aa, synthetic construct
DNQLTQSPSFLSASVGDRVTITCRASSSVNYIYWYQQKPGKAPKLLIYYTSNLAPGVPSRFSGSGSGNEYTLTISSLQPEDFATYYCQQFTSTPFTFGQGTKLEIKRTVAAPSVFIFPPSDEQLKSGTASVVCLLNNFYPREAKVQWKVDNALQSGNSQESVTEQDSKDSTYSLSSTLTLSKADYEKHKVYACEVTHQGLSSPVTKSFNRGEC

SEQ ID NO: 2183 - protein, 213 aa, synthetic construct
DNQLTQSPSFLSASVGDRVTITCRASSSVNYIYWYQQKPGKAPKLLIYYTSNLAPGVPSRFSGSGSGNEYTLTISSLQPEDFATYYCQQFTSVPFTFGQGTKLEIKRTVAAPSVFIFPPSDEQLKSGTASVVCLLNNFYPREAKVQWKVDNALQSGNSQESVTEQDSKDSTYSLSSTLTLSKADYEKHKVYACEVTHQGLSSPVTKSFNRGEC

SEQ ID NO: 2184 - protein, 213 aa, synthetic construct
DNQLTQSPSFLSASVGDRVTITCRASSSVNYIYWYQQKPGKAPKLLIYYTSNLAPGVPSRFSGSGSGNEYTLTISSLQPEDFATYYCQQFTSWPFTFGQGTKLEIKRTVAAPSVFIFPPSDEQLKSGTASVVCLLNNFYPREAKVQWKVDNALQSGNSQESVTEQDSKDSTYSLSSTLTLSKADYEKHKVYACEVTHQGLSSPVTKSFNRGEC

SEQ ID NO: 2185 - protein, 213 aa, synthetic construct
DNQLTQSPSFLSASVGDRVTITCRASSSVNYIYWYQQKPGKAPKLLIYYTSNLAPGVPSRFSGSGSGNEYTLTISSLQPEDFATYYCQQFTSSAFTFGQGTKLEIKRTVAAPSVFIFPPSDEQLKSGTASVVCLLNNFYPREAKVQWKVDNALQSGNSQESVTEQDSKDSTYSLSSTLTLSKADYEKHKVYACEVTHQGLSSPVTKSFNRGEC

SEQ ID NO: 2186 - protein, 213 aa, synthetic construct
DNQLTQSPSFLSASVGDRVTITCRASSSVNYIYWYQQKPGKAPKLLIYYTSNLAPGVPSRFSGSGSGNEYTLTISSLQPEDFATYYCQQFTSSCFTFGQGTKLEIKRTVAAPSVFIFPPSDEQLKSGTASVVCLLNNFYPREAKVQWKVDNALQSGNSQESVTEQDSKDSTYSLSSTLTLSKADYEKHKVYACEVTHQGLSSPVTKSFNRGEC

SEQ ID NO: 2187 - protein, 213 aa, synthetic construct
DNQLTQSPSFLSASVGDRVTITCRASSSVNYIYWYQQKPGKAPKLLIYYTSNLAPGVPSRFSGSGSGNEYTLTISSLQPEDFATYYCQQFTSSEFTFGQGTKLEIKRTVAAPSVFIFPPSDEQLKSGTASVVCLLNNFYPREAKVQWKVDNALQSGNSQESVTEQDSKDSTYSLSSTLTLSKADYEKHKVYACEVTHQGLSSPVTKSFNRGEC

SEQ ID NO: 2188 - protein, 213 aa, synthetic construct
DNQLTQSPSFLSASVGDRVTITCRASSSVNYIYWYQQKPGKAPKLLIYYTSNLAPGVPSRFSGSGSGNEYTLTISSLQPEDFATYYCQQFTSSFFTFGQGTKLEIKRTVAAPSVFIFPPSDEQLKSGTASVVCLLNNFYPREAKVQWKVDNALQSGNSQESVTEQDSKDSTYSLSSTLTLSKADYEKHKVYACEVTHQGLSSPVTKSFNRGEC

SEQ ID NO: 2189 - protein, 213 aa, synthetic construct
DNQLTQSPSFLSASVGDRVTITCRASSSVNYIYWYQQKPGKAPKLLIYYTSNLAPGVPSRFSGSGSGNEYTLTISSLQPEDFATYYCQQFTSSHFTFGQGTKLEIKRTVAAPSVFIFPPSDEQLKSGTASVVCLLNNFYPREAKVQWKVDNALQSGNSQESVTEQDSKDSTYSLSSTLTLSKADYEKHKVYACEVTHQGLSSPVTKSFNRGEC

SEQ ID NO: 2190 - protein, 213 aa, synthetic construct
DNQLTQSPSFLSASVGDRVTITCRASSSVNYIYWYQQKPGKAPKLLIYYTSNLAPGVPSRFSGSGSGNEYTLTISSLQPEDFATYYCQQFTSSIFTFGQGTKLEIKRTVAAPSVFIFPPSDEQLKSGTASVVCLLNNFYPREAKVQWKVDNALQSGNSQESVTEQDSKDSTYSLSSTLTLSKADYEKHKVYACEVTHQGLSSPVTKSFNRGEC

SEQ ID NO: 2191 - protein, 213 aa, synthetic construct
DNQLTQSPSFLSASVGDRVTITCRASSSVNYIYWYQQKPGKAPKLLIYYTSNLAPGVPSRFSGSGSGNEYTLTISSLQPEDFATYYCQQFTSSKFTFGQGTKLEIKRTVAAPSVFIFPPSDEQLKSGTASVVCLLNNFYPREAKVQWKVDNALQSGNSQESVTEQDSKDSTYSLSSTLTLSKADYEKHKVYACEVTHQGLSSPVTKSFNRGEC

SEQ ID NO: 2192 - protein, 213 aa, synthetic construct
DNQLTQSPSFLSASVGDRVTITCRASSSVNYIYWYQQKPGKAPKLLIYYTSNLAPGVPSRFSGSGSGNEYTLTISSLQPEDFATYYCQQFTSSLFTFGQGTKLEIKRTVAAPSVFIFPPSDEQLKSGTASVVCLLNNFYPREAKVQWKVDNALQSGNSQESVTEQDSKDSTYSLSSTLTLSKADYEKHKVYACEVTHQGLSSPVTKSFNRGEC

SEQ ID NO: 2193 - protein, 213 aa, synthetic construct
DNQLTQSPSFLSASVGDRVTITCRASSSVNYIYWYQQKPGKAPKLLIYYTSNLAPGVPSRFSGSGSGNEYTLTISSLQPEDFATYYCQQFTSSNFTFGQGTKLEIKRTVAAPSVFIFPPSDEQLKSGTASVVCLLNNFYPREAKVQWKVDNALQSGNSQESVTEQDSKDSTYSLSSTLTLSKADYEKHKVYACEVTHQGLSSPVTKSFNRGEC

SEQ ID NO: 2194 - protein, 213 aa, synthetic construct
DNQLTQSPSFLSASVGDRVTITCRASSSVNYIYWYQQKPGKAPKLLIYYTSNLAPGVPSRFSGSGSGNEYTLTISSLQPEDFATYYCQQFTSSQFTFGQGTKLEIKRTVAAPSVFIFPPSDEQLKSGTASVVCLLNNFYPREAKVQWKVDNALQSGNSQESVTEQDSKDSTYSLSSTLTLSKADYEKHKVYACEVTHQGLSSPVTKSFNRGEC

SEQ ID NO: 2195 - protein, 213 aa, synthetic construct
DNQLTQSPSFLSASVGDRVTITCRASSSVNYIYWYQQKPGKAPKLLIYYTSNLAPGVPSRFSGSGSGNEYTLTISSLQPEDFATYYCQQFTSSRFTFGQGTKLEIKRTVAAPSVFIFPPSDEQLKSGTASVVCLLNNFYPREAKVQWKVDNALQSGNSQESVTEQDSKDSTYSLSSTLTLSKADYEKHKVYACEVTHQGLSSPVTKSFNRGEC

SEQ ID NO: 2196 - protein, 213 aa, synthetic construct
DNQLTQSPSFLSASVGDRVTITCRASSSVNYIYWYQQKPGKAPKLLIYYTSNLAPGVPSRFSGSGSGNEYTLTISSLQPEDFATYYCQQFTSSSFTFGQGTKLEIKRTVAAPSVFIFPPSDEQLKSGTASVVCLLNNFYPREAKVQWKVDNALQSGNSQESVTEQDSKDSTYSLSSTLTLSKADYEKHKVYACEVTHQGLSSPVTKSFNRGEC

SEQ ID NO: 2197 - protein, 213 aa, synthetic construct
DNQLTQSPSFLSASVGDRVTITCRASSSVNYIYWYQQKPGKAPKLLIYYTSNLAPGVPSRFSGSGSGNEYTLTISSLQPEDFATYYCQQFTSSTFTFGQGTKLEIKRTVAAPSVFIFPPSDEQLKSGTASVVCLLNNFYPREAKVQWKVDNALQSGNSQESVTEQDSKDSTYSLSSTLTLSKADYEKHKVYACEVTHQGLSSPVTKSFNRGEC

SEQ ID NO: 2198 - protein, 213 aa, synthetic construct
DNQLTQSPSFLSASVGDRVTITCRASSSVNYIYWYQQKPGKAPKLLIYYTSNLAPGVPSRFSGSGSGNEYTLTISSLQPEDFATYYCQQFTSSVFTFGQGTKLEIKRTVAAPSVFIFPPSDEQLKSGTASVVCLLNNFYPREAKVQWKVDNALQSGNSQESVTEQDSKDSTYSLSSTLTLSKADYEKHKVYACEVTHQGLSSPVTKSFNRGEC

SEQ ID NO: 2199 - protein, 213 aa, synthetic construct
DNQLTQSPSFLSASVGDRVTITCRASSSVNYIYWYQQKPGKAPKLLIYYTSNLAPGVPSRFSGSGSGNEYTLTISSLQPEDFATYYCQQFTSSWFTFGQGTKLEIKRTVAAPSVFIFPPSDEQLKSGTASVVCLLNNFYPREAKVQWKVDNALQSGNSQESVTEQDSKDSTYSLSSTLTLSKADYEKHKVYACEVTHQGLSSPVTKSFNRGEC

SEQ ID NO: 2200 - protein, 213 aa, synthetic construct
DNQLTQSPSFLSASVGDRVTITCRASSSVNYIYWYQQKPGKAPKLLIYYTSNLAPGVPSRFSGSGSGNEYTLTISSLQPEDFATYYCQQFTSSYFTFGQGTKLEIKRTVAAPSVFIFPPSDEQLKSGTASVVCLLNNFYPREAKVQWKVDNALQSGNSQESVTEQDSKDSTYSLSSTLTLSKADYEKHKVYACEVTHQGLSSPVTKSFNRGEC

SEQ ID NO: 2201 - protein, 213 aa, synthetic construct
DNQLTQSPSFLSASVGDRVTITCRASSSVNYIYWYQQKPGKAPKLLIYYTSNLAPGVPSRFSGSGSGNEYTLTISSLQPEDFATYYCQQFTSSPATFGQGTKLEIKRTVAAPSVFIFPPSDEQLKSGTASVVCLLNNFYPREAKVQWKVDNALQSGNSQESVTEQDSKDSTYSLSSTLTLSKADYEKHKVYACEVTHQGLSSPVTKSFNRGEC

SEQ ID NO: 2202 - protein, 213 aa, synthetic construct
DNQLTQSPSFLSASVGDRVTITCRASSSVNYIYWYQQKPGKAPKLLIYYTSNLAPGVPSRFSGSGSGNEYTLTISSLQPEDFATYYCQQFTSSPETFGQGTKLEIKRTVAAPSVFIFPPSDEQLKSGTASVVCLLNNFYPREAKVQWKVDNALQSGNSQESVTEQDSKDSTYSLSSTLTLSKADYEKHKVYACEVTHQGLSSPVTKSFNRGEC

SEQ ID NO: 2203 - protein, 213 aa, synthetic construct
DNQLTQSPSFLSASVGDRVTITCRASSSVNYIYWYQQKPGKAPKLLIYYTSNLAPGVPSRFSGSGSGNEYTLTISSLQPEDFATYYCQQFTSSPGTFGQGTKLEIKRTVAAPSVFIFPPSDEQLKSGTASVVCLLNNFYPREAKVQWKVDNALQSGNSQESVTEQDSKDSTYSLSSTLTLSKADYEKHKVYACEVTHQGLSSPVTKSFNRGEC

SEQ ID NO: 2204 - protein, 213 aa, synthetic construct
DNQLTQSPSFLSASVGDRVTITCRASSSVNYIYWYQQKPGKAPKLLIYYTSNLAPGVPSRFSGSGSGNEYTLTISSLQPEDFATYYCQQFTSSPHTFGQGTKLEIKRTVAAPSVFIFPPSDEQLKSGTASVVCLLNNFYPREAKVQWKVDNALQSGNSQESVTEQDSKDSTYSLSSTLTLSKADYEKHKVYACEVTHQGLSSPVTKSFNRGEC

SEQ ID NO: 2205 - protein, 213 aa, synthetic construct
DNQLTQSPSFLSASVGDRVTITCRASSSVNYIYWYQQKPGKAPKLLIYYTSNLAPGVPSRFSGSGSGNEYTLTISSLQPEDFATYYCQQFTSSPITFGQGTKLEIKRTVAAPSVFIFPPSDEQLKSGTASVVCLLNNFYPREAKVQWKVDNALQSGNSQESVTEQDSKDSTYSLSSTLTLSKADYEKHKVYACEVTHQGLSSPVTKSFNRGEC

SEQ ID NO: 2206 - protein, 213 aa, synthetic construct
DNQLTQSPSFLSASVGDRVTITCRASSSVNYIYWYQQKPGKAPKLLIYYTSNLAPGVPSRFSGSGSGNEYTLTISSLQPEDFATYYCQQFTSSPLTFGQGTKLEIKRTVAAPSVFIFPPSDEQLKSGTASVVCLLNNFYPREAKVQWKVDNALQSGNSQESVTEQDSKDSTYSLSSTLTLSKADYEKHKVYACEVTHQGLSSPVTKSFNRGEC

SEQ ID NO: 2207 - protein, 213 aa, synthetic construct
DNQLTQSPSFLSASVGDRVTITCRASSSVNYIYWYQQKPGKAPKLLIYYTSNLAPGVPSRFSGSGSGNEYTLTISSLQPEDFATYYCQQFTSSPMTFGQGTKLEIKRTVAAPSVFIFPPSDEQLKSGTASVVCLLNNFYPREAKVQWKVDNALQSGNSQESVTEQDSKDSTYSLSSTLTLSKADYEKHKVYACEVTHQGLSSPVTKSFNRGEC

SEQ ID NO: 2208 - protein, 213 aa, synthetic construct
DNQLTQSPSFLSASVGDRVTITCRASSSVNYIYWYQQKPGKAPKLLIYYTSNLAPGVPSRFSGSGSGNEYTLTISSLQPEDFATYYCQQFTSSPNTFGQGTKLEIKRTVAAPSVFIFPPSDEQLKSGTASVVCLLNNFYPREAKVQWKVDNALQSGNSQESVTEQDSKDSTYSLSSTLTLSKADYEKHKVYACEVTHQGLSSPVTKSFNRGEC

SEQ ID NO: 2209 - protein, 213 aa, synthetic construct
DNQLTQSPSFLSASVGDRVTITCRASSSVNYIYWYQQKPGKAPKLLIYYTSNLAPGVPSRFSGSGSGNEYTLTISSLQPEDFATYYCQQFTSSPPTFGQGTKLEIKRTVAAPSVFIFPPSDEQLKSGTASVVCLLNNFYPREAKVQWKVDNALQSGNSQESVTEQDSKDSTYSLSSTLTLSKADYEKHKVYACEVTHQGLSSPVTKSFNRGEC

SEQ ID NO: 2210 - protein, 213 aa, synthetic construct
DNQLTQSPSFLSASVGDRVTITCRASSSVNYIYWYQQKPGKAPKLLIYYTSNLAPGVPSRFSGSGSGNEYTLTISSLQPEDFATYYCQQFTSSPQTFGQGTKLEIKRTVAAPSVFIFPPSDEQLKSGTASVVCLLNNFYPREAKVQWKVDNALQSGNSQESVTEQDSKDSTYSLSSTLTLSKADYEKHKVYACEVTHQGLSSPVTKSFNRGEC

SEQ ID NO: 2211 - protein, 213 aa, synthetic construct
DNQLTQSPSFLSASVGDRVTITCRASSSVNYIYWYQQKPGKAPKLLIYYTSNLAPGVPSRFSGSGSGNEYTLTISSLQPEDFATYYCQQFTSSPRTFGQGTKLEIKRTVAAPSVFIFPPSDEQLKSGTASVVCLLNNFYPREAKVQWKVDNALQSGNSQESVTEQDSKDSTYSLSSTLTLSKADYEKHKVYACEVTHQGLSSPVTKSFNRGEC

SEQ ID NO: 2212 - protein, 213 aa, synthetic construct
DNQLTQSPSFLSASVGDRVTITCRASSSVNYIYWYQQKPGKAPKLLIYYTSNLAPGVPSRFSGSGSGNEYTLTISSLQPEDFATYYCQQFTSSPSTFGQGTKLEIKRTVAAPSVFIFPPSDEQLKSGTASVVCLLNNFYPREAKVQWKVDNALQSGNSQESVTEQDSKDSTYSLSSTLTLSKADYEKHKVYACEVTHQGLSSPVTKSFNRGEC

SEQ ID NO: 2213 - protein, 213 aa, synthetic construct
DNQLTQSPSFLSASVGDRVTITCRASSSVNYIYWYQQKPGKAPKLLIYYTSNLAPGVPSRFSGSGSGNEYTLTISSLQPEDFATYYCQQFTSSPVTFGQGTKLEIKRTVAAPSVFIFPPSDEQLKSGTASVVCLLNNFYPREAKVQWKVDNALQSGNSQESVTEQDSKDSTYSLSSTLTLSKADYEKHKVYACEVTHQGLSSPVTKSFNRGEC

SEQ ID NO: 2214 - protein, 213 aa, synthetic construct
DNQLTQSPSFLSASVGDRVTITCRASSSVNYIYWYQQKPGKAPKLLIYYTSNLAPGVPSRFSGSGSGNEYTLTISSLQPEDFATYYCQQFTSSPWTFGQGTKLEIKRTVAAPSVFIFPPSDEQLKSGTASVVCLLNNFYPREAKVQWKVDNALQSGNSQESVTEQDSKDSTYSLSSTLTLSKADYEKHKVYACEVTHQGLSSPVTKSFNRGEC

SEQ ID NO: 2215 - protein, 213 aa, synthetic construct
DNQLTQSPSFLSASVGDRVTITCRASSSVNYIYWYQQKPGKAPKLLIYYTSNLAPGVPSRFSGSGSGNEYTLTISSLQPEDFATYYCQQFTSSPFDFGQGTKLEIKRTVAAPSVFIFPPSDEQLKSGTASVVCLLNNFYPREAKVQWKVDNALQSGNSQESVTEQDSKDSTYSLSSTLTLSKADYEKHKVYACEVTHQGLSSPVTKSFNRGEC

SEQ ID NO: 2216 - protein, 213 aa, synthetic construct
DNQLTQSPSFLSASVGDRVTITCRASSSVNYIYWYQQKPGKAPKLLIYYTSNLAPGVPSRFSGSGSGNEYTLTISSLQPEDFATYYCQQFTSSPFEFGQGTKLEIKRTVAAPSVFIFPPSDEQLKSGTASVVCLLNNFYPREAKVQWKVDNALQSGNSQESVTEQDSKDSTYSLSSTLTLSKADYEKHKVYACEVTHQGLSSPVTKSFNRGEC

SEQ ID NO: 2217 - protein, 213 aa, synthetic construct
DNQLTQSPSFLSASVGDRVTITCRASSSVNYIYWYQQKPGKAPKLLIYYTSNLAPGVPSRFSGSGSGNEYTLTISSLQPEDFATYYCQQFTSSPFFFGQGTKLEIKRTVAAPSVFIFPPSDEQLKSGTASVVCLLNNFYPREAKVQWKVDNALQSGNSQESVTEQDSKDSTYSLSSTLTLSKADYEKHKVYACEVTHQGLSSPVTKSFNRGEC

SEQ ID NO: 2218 - protein, 213 aa, synthetic construct
DNQLTQSPSFLSASVGDRVTITCRASSSVNYIYWYQQKPGKAPKLLIYYTSNLAPGVPSRFSGSGSGNEYTLTISSLQPEDFATYYCQQFTSSPFGFGQGTKLEIKRTVAAPSVFIFPPSDEQLKSGTASVVCLLNNFYPREAKVQWKVDNALQSGNSQESVTEQDSKDSTYSLSSTLTLSKADYEKHKVYACEVTHQGLSSPVTKSFNRGEC

SEQ ID NO: 2219 - protein, 213 aa, synthetic construct
DNQLTQSPSFLSASVGDRVTITCRASSSVNYIYWYQQKPGKAPKLLIYYTSNLAPGVPSRFSGSGSGNEYTLTISSLQPEDFATYYCQQFTSSPFHFGQGTKLEIKRTVAAPSVFIFPPSDEQLKSGTASVVCLLNNFYPREAKVQWKVDNALQSGNSQESVTEQDSKDSTYSLSSTLTLSKADYEKHKVYACEVTHQGLSSPVTKSFNRGEC

SEQ ID NO: 2220 - protein, 213 aa, synthetic construct
DNQLTQSPSFLSASVGDRVTITCRASSSVNYIYWYQQKPGKAPKLLIYYTSNLAPGVPSRFSGSGSGNEYTLTISSLQPEDFATYYCQQFTSSPFIFGQGTKLEIKRTVAAPSVFIFPPSDEQLKSGTASVVCLLNNFYPREAKVQWKVDNALQSGNSQESVTEQDSKDSTYSLSSTLTLSKADYEKHKVYACEVTHQGLSSPVTKSFNRGEC

SEQ ID NO: 2221 - protein, 213 aa, synthetic construct
DNQLTQSPSFLSASVGDRVTITCRASSSVNYIYWYQQKPGKAPKLLIYYTSNLAPGVPSRFSGSGSGNEYTLTISSLQPEDFATYYCQQFTSSPFKFGQGTKLEIKRTVAAPSVFIFPPSDEQLKSGTASVVCLLNNFYPREAKVQWKVDNALQSGNSQESVTEQDSKDSTYSLSSTLTLSKADYEKHKVYACEVTHQGLSSPVTKSFNRGEC

SEQ ID NO: 2222 - protein, 213 aa, synthetic construct
DNQLTQSPSFLSASVGDRVTITCRASSSVNYIYWYQQKPGKAPKLLIYYTSNLAPGVPSRFSGSGSGNEYTLTISSLQPEDFATYYCQQFTSSPFLFGQGTKLEIKRTVAAPSVFIFPPSDEQLKSGTASVVCLLNNFYPREAKVQWKVDNALQSGNSQESVTEQDSKDSTYSLSSTLTLSKADYEKHKVYACEVTHQGLSSPVTKSFNRGEC

SEQ ID NO: 2223 - protein, 213 aa, synthetic construct
DNQLTQSPSFLSASVGDRVTITCRASSSVNYIYWYQQKPGKAPKLLIYYTSNLAPGVPSRFSGSGSGNEYTLTISSLQPEDFATYYCQQFTSSPFMFGQGTKLEIKRTVAAPSVFIFPPSDEQLKSGTASVVCLLNNFYPREAKVQWKVDNALQSGNSQESVTEQDSKDSTYSLSSTLTLSKADYEKHKVYACEVTHQGLSSPVTKSFNRGEC

SEQ ID NO: 2224 - protein, 213 aa, synthetic construct
DNQLTQSPSFLSASVGDRVTITCRASSSVNYIYWYQQKPGKAPKLLIYYTSNLAPGVPSRFSGSGSGNEYTLTISSLQPEDFATYYCQQFTSSPFQFGQGTKLEIKRTVAAPSVFIFPPSDEQLKSGTASVVCLLNNFYPREAKVQWKVDNALQSGNSQESVTEQDSKDSTYSLSSTLTLSKADYEKHKVYACEVTHQGLSSPVTKSFNRGEC

SEQ ID NO: 2225 - protein, 213 aa, synthetic construct
DNQLTQSPSFLSASVGDRVTITCRASSSVNYIYWYQQKPGKAPKLLIYYTSNLAPGVPSRFSGSGSGNEYTLTISSLQPEDFATYYCQQFTSSPFRFGQGTKLEIKRTVAAPSVFIFPPSDEQLKSGTASVVCLLNNFYPREAKVQWKVDNALQSGNSQESVTEQDSKDSTYSLSSTLTLSKADYEKHKVYACEVTHQGLSSPVTKSFNRGEC

SEQ ID NO: 2226 - protein, 213 aa, synthetic construct
DNQLTQSPSFLSASVGDRVTITCRASSSVNYIYWYQQKPGKAPKLLIYYTSNLAPGVPSRFSGSGSGNEYTLTISSLQPEDFATYYCQQFTSSPFSFGQGTKLEIKRTVAAPSVFIFPPSDEQLKSGTASVVCLLNNFYPREAKVQWKVDNALQSGNSQESVTEQDSKDSTYSLSSTLTLSKADYEKHKVYACEVTHQGLSSPVTKSFNRGEC

SEQ ID NO: 2227 - protein, 213 aa, synthetic construct
DNQLTQSPSFLSASVGDRVTITCRASSSVNYIYWYQQKPGKAPKLLIYYTSNLAPGVPSRFSGSGSGNEYTLTISSLQPEDFATYYCQQFTSSPFVFGQGTKLEIKRTVAAPSVFIFPPSDEQLKSGTASVVCLLNNFYPREAKVQWKVDNALQSGNSQESVTEQDSKDSTYSLSSTLTLSKADYEKHKVYACEVTHQGLSSPVTKSFNRGEC

SEQ ID NO: 2228 - protein, 213 aa, synthetic construct
DNQLTQSPSFLSASVGDRVTITCRASSSVNYIYWYQQKPGKAPKLLIYYTSNLAPGVPSRFSGSGSGNEYTLTISSLQPEDFATYYCQQFTSSPFWFGQGTKLEIKRTVAAPSVFIFPPSDEQLKSGTASVVCLLNNFYPREAKVQWKVDNALQSGNSQESVTEQDSKDSTYSLSSTLTLSKADYEKHKVYACEVTHQGLSSPVTKSFNRGEC

SEQ ID NO: 2229 - protein, 213 aa, synthetic construct
DNQLTQSPSFLSASVGDRVTITCRASSSVNYIYWYQQKPGKAPKLLIYYTSNLAPGVPSRFSGSGSGNEYTLTISSLQPEDFATYYCQQFTSSPFYFGQGTKLEIKRTVAAPSVFIFPPSDEQLKSGTASVVCLLNNFYPREAKVQWKVDNALQSGNSQESVTEQDSKDSTYSLSSTLTLSKADYEKHKVYACEVTHQGLSSPVTKSFNRGEC

SEQ ID NO: 2230 - protein, 95 aa, Homo sapiens
DAGVTQSPTHLIKTRGQQVTLRCSPISGHKSVSWYQQVLGQGPQFIFQYYEKEERGRGNFPDRFSARQFPNYSSELNVNALLLGDSALYLCASSL

SEQ ID NO: 2231 - protein, 94 aa, Macaca fascicularis
DGGVTQSPRHLIKTTGQQVTLRCSPISGHTSVSWYQQALGQGPQFIFEYEEKERERGNFPDRFSGHQFSNYSSELNVNALEAGDSALYLCASSL

SEQ ID NO: 2232 - protein, 95 aa, Homo sapiens
DAGVTQSPTHLIKTRGQQVTLRCSPKSGHDTVSWYQQALGQGPQFIFQYYEEEERQRGNFPDRFSGHQFPNYSSELNVNALLLGDSALYLCASSL

SEQ ID NO: 2233 - protein, 95 aa, Macaca mulatta
DTGVTQSPTHLIRKRGQQVTLRCSPISGHNTVSWYQQALGQGPQFIFQYYEKEERERGNFPGRFSGHQFPNYSSELNVSALLLGDSALYLCASSL

SEQ ID NO: 2234 - protein, 95 aa, Macaca fascicularis
NVGVTQTPKFQVLKTGQSMTVQCAQDMNHNFMYWYRQDPGMGLRLIHYSGAAGTTDKGEVPSGYNVSRLNTEDFPLRLESADPSQTSVYICASSY

SEQ ID NO: 2235 - protein, 95 aa, Macaca mulatta
NVGVTQTPKFQVLKTGQSMTVQCAQDMNHNFMYWYRQDPGMGLRLIHYSGAAGTTDKGEVPSGYNVSRLNTEDFPLRLESADPSQTSVYFCASSY

SEQ ID NO: 2236 - protein, 96 aa, Homo sapiens
DAGVIQSPRHEVTEMGQEVTLRCKPISGHNSLFWYRQTMMRGLELLIYFNNNVPIDDSGMPEDRFSAKMPNASFSTLKIQPSEPRDSAVYFCASSL

SEQ ID NO: 2237 - protein, 96 aa, Macaca fascicularis
DAGVIQSPRHEVTEMGKEVTLRCEPISGHTYLFWYRQTMMRGLEFLIYFNNKSPIDDSGMPKDRFSAKMPDASFSTLKIQPSEPRDSAVYFCASSL

SEQ ID NO: 2238 - protein, 96 aa, Macaca mulatta
DAGVIQSPQHEVTEMGKEVTLRCEPISGHTYLFWYRQTMMRGLEFLIYFNNKSPIDDSGMPKDRFSATMPEVSFSTLKIQPSEPRDSAVYFCASSL

SEQ ID NO: 2239 - protein, 96 aa, Homo sapiens
DAGVIQSPRHEVTEMGQEVTLRCKPISGHDYLFWYRQTMMRGLELLIYFNNNVPIDDSGMPEDRFSAKMPNASFSTLKIQPSEPRDSAVYFCASSL

SEQ ID NO: 2240 - protein, 96 aa, Macaca fascicularis
DAGVTQTPRHKVTEMGQEVTMRCQPILGHNTVFWYRQTVMQGLELLVYLRNKASLDDSGMPKDRFSAEMPDASLATLKIQPSEPRDSAVYLCASGL

SEQ ID NO: 2241 - protein, 96 aa, Macaca mulatta; identical to SEQ ID NO: 2240

SEQ ID NO: 2242 - protein, 97 aa, Homo sapiens
GAVVSQHPSWVICKSGTSVKIECRSLDFQATTMFWYRQFPKQSLMLMATSNEGSKATYEQGVEKDKFLINHASLTLSTLTVTSAHPEDSSFYICSAR

SEQ ID NO: 2243 - protein, 97 aa, Macaca fascicularis
AAVVSQYPSRVICKRGTSVKIECRCLDFQATTMFWYRQFQTQSLILMATSNEGSGVTYEQGVKQDKFPINHPNLTFSTLTVTNAHPEDSSFYICSAR

SEQ ID NO: 2244 - protein, 97 aa, Macaca mulatta; identical to SEQ ID NO: 2243

SEQ ID NO: 2245 - protein, 8 aa, synthetic construct
GFNIKSAY

SEQ ID NO: 2246 - protein, 8 aa, synthetic construct
IDPATGKT

SEQ ID NO: 2247 - protein, 12 aa, synthetic construct
TRSLNWDYGLDY

SEQ ID NO: 2248 - protein, 10 aa, synthetic construct
KSVSILGTHL

SEQ ID NO: 2249 - protein, 9 aa, synthetic construct
QQSIEDPWT

SEQ ID NO: 2250 - protein, 5 aa, synthetic construct
SAYMH

SEQ ID NO: 2251 - protein, 17 aa, synthetic construct
RIDPATGKTKYAPKFQA

SEQ ID NO: 2252 - protein, 10 aa, synthetic construct
SLNWDYGLDY

SEQ ID NO: 2253 - protein, 15 aa, synthetic construct
RASKSVSILGTHLIH

SEQ ID NO: 2254 - protein, 7 aa, synthetic construct
AASNLES

SEQ ID NO: 2255 - protein, 119 aa, synthetic construct
EVQLQQSVADLVRPGASLKLSCTASGFNIKSAYMHWVIQRPDQGPECLGRIDPATGKTKYAPKFQAKATITADTSSNTAYLQLSSLTSEDTAIYYCTRSLNWDYGLDYWGQGTSVTVSS

SEQ ID NO: 2256 - protein, 111 aa, synthetic construct
DIVLTQSPASLAVSLGQRATISCRASKSVSILGTHLIHWYQQKPGQPPKLLIYAASNLESGVPARFSGSGSETVFTLNIHPVEEEDAATYFCQQSIEDPWTFGGGTKLGIK

SEQ ID NO: 2257 - protein, 8 aa, synthetic construct
GFSLTAYG

SEQ ID NO: 2258 - protein, 7 aa, synthetic construct
IWGDGNT

SEQ ID NO: 2259 - protein, 14 aa, synthetic construct
ARDRVTATLYAMDY

SEQ ID NO: 2260 - protein, 6 aa, synthetic construct
QGISNY

SEQ ID NO: 2261 - protein, 9 aa, synthetic construct
QQYSKLPRT

SEQ ID NO: 2262 - protein, 5 aa, synthetic construct
AYGVN

SEQ ID NO: 2263 - protein, 16 aa, synthetic construct
MIWGDGNTDYNSALKS

SEQ ID NO: 2264 - protein, 12 aa, synthetic construct
DRVTATLYAMDY

SEQ ID NO: 2265 - protein, 11 aa, synthetic construct
SASQGISNYLN

SEQ ID NO: 2266 - protein, 7 aa, synthetic construct
YTSSLHS

SEQ ID NO: 2267 - protein, 120 aa, synthetic construct
QVTLKESGPVLVKPTETLTLTCTVSGFSLTAYGVNWVRQPPGKALEWLGMIWGDGNTDYNSALKSRLTISKDNSKSQVVLTMTNMDPVDTATYYCARDRVTATLYAMDYWGQGTLVTVSS

SEQ ID NO: 2268 - protein, 107 aa, synthetic construct
DIQMTQSPSSLSASVGDRVTITCSASQGISNYLNWYQQKPGKAVKLLIYYTSSLHSGVPSRFSGSGSGTDYTLTISSLQPEDFATYYCQQYSKLPRTFGGGTKVEIK

SEQ ID NO: 2269 - protein, 177 aa, Homo sapiens
EDLNKVFPPEVAVFEPSEAEISHTQKATLVCLATGFFPDHVELSWWVNGKEVHSGVSTDPQPLKEQPALNDSRYCLSSRLRVSATFWQNPRNHFRCQVQFYGLSENDEWTQDRAKPVTQIVSAEAWGRADCGFTSVSYQQGVLSATILYEILLGKATLYAVLVSALVLMAMVKRKDF

SEQ ID NO: 2270 - protein, 177 aa, Macaca mulatta
EDLKKVFPPKVAVFEPSEAEISHTQKATLVCLATGFYPDHVELSWWVNGKEVHSGVSTDPQPLKEQPALEDSRYCLSSRLRVSATFWHNPRNHFRCQVQFYGLSEDDEWTEDRDKPITQKISAEVWGRADCGFTSVSYQQGVLSATILYEILLGKATLYAVLVSALMLMAMVKRKDF

SEQ ID NO: 2271 - protein, 176 aa, Macaca fascicularis
EDLKKVFPPKVAVFEPSEAEISHTQKATLVCLATGFYPDHVELSWWVNGKEVHSGVSTDPQPLKEQPALEDSRYCLSSRLRVSATFWHNPRNHFRCQVQFYGLSEDDEWTEDRDKPITQKISAEVWGRACGFTSVSYQQGVLSATILYEILLGKATLYAVLVSALMLMAMVKRKDF

SEQ ID NO: 2272 - protein, 177 aa, Macaca mulatta
EDLKKVFPPKVAVFEPSEAEISHTQKATLVCLATGFYPDHVELSWWVNGKEVHSGVSTDPQPLKEQPALEDSRYCLSSRLRVSATFWHNPRNHFRCQVQFYGLSEDDEWTEDRDKPITQKISAEVWGRADCGFTSVSYQQGVLSATILYEILLGKASLYAVLVSALMLMAMVKRKDF

SEQ ID NO: 2273 - protein, 179 aa, Homo sapiens
EDLKNVFPPEVAVFEPSEAEISHTQKATLVCLATGFYPDHVELSWWVNGKEVHSGVSTDPQPLKEQPALNDSRYCLSSRLRVSATFWQNPRNHFRCQVQFYGLSENDEWTQDRAKPVTQIVSAEAWGRADCGFTSESYQQGVLSATILYEILLGKATLYAVLVSALVLMAMVKRKDSRG

SEQ ID NO: 2274 - protein, 177 aa, Macaca mulatta
EDLKKVFPPKVAVFEPSEAEISHTQKATLVCLATGFYPDHVELSWWVNGKEVHSGVSTDPQPLKEQPTLEDSRYCLSSRLRVSATFWHNPRNHFRCQVQFYGLSEDDEWTEDRDKPITQKISAEAWGRADCGFTSESYQQGVLSATILYEILLGKATLYAVLVSALVLMAMVKRKDS

SEQ ID NO: 2275 - protein, 177 aa, Macaca fascicularis
EDLKKVFPPKVAVFEPSEAEISHTQKATLVCLATGFYPDHVELSWWVNGKEVHSGVSTDPQPLKEQPALEDSRYCLSSRLRVSATFWHNPRNHFRCQVQFYGLSEDDEWTEDRDKPITQKISAEAWGRADCGFTSESYQQGVLSATILYEILLGKATLYAVLVSALVLMAMVKRKDS

SEQ ID NO: 2276 - protein, 178 aa, Homo sapiens
DLKNVFPPKVAVFEPSEAEISHTQKATLVCLATGFYPDHVELSWWVNGKEVHSGVSTDPQPLKEQPALNDSRYCLSSRLRVSATFWQNPRNHFRCQVQFYGLSENDEWTQDRAKPVTQIVSAEAWGRATVASPPESYQQGVLSATILYEILLGKATLYAVLVSALVLMAMVKRKDSRG

SEQ ID NO: 2277 - protein, 177 aa, Macaca mulatta; identical to SEQ ID NO: 2274

SEQ ID NO: 2278 - protein, 8 aa, synthetic construct
GYTFTGYV

SEQ ID NO: 2279 - protein, 8 aa, synthetic construct
INPYNDDI

SEQ ID NO: 2280 - protein, 17 aa, synthetic construct
ARGAGYNFDGAYRFFDF

SEQ ID NO: 2281 - protein, 11 aa, synthetic construct
QRLVHSNGNTY

SEQ ID NO: 2282 - protein, 9 aa, synthetic construct
SQSTHVPYT

SEQ ID NO: 2283 - protein, 5 aa, synthetic construct
GYVMH

SEQ ID NO: 2284 - protein, 17 aa, synthetic construct
FINPYNDDIQSNERFRG

SEQ ID NO: 2285 - protein, 15 aa, synthetic construct
GAGYNFDGAYRFFDF

SEQ ID NO: 2286 - protein, 16 aa, synthetic construct
RSSQRLVHSNGNTYLH

SEQ ID NO: 2287 - protein, 7 aa, synthetic construct
RVSNRFP

SEQ ID NO: 2288 - protein, 124 aa, synthetic construct
QVQLVQSGAEVKKPGASVKVSCKASGYTFTGYVMHWVRQAPGQGLEWMGFINPYNDDIQSNERFRGRVTMTRDTSISTAYMELSRLRSDDTAVYYCARGAGYNFDGAYRFFDFWGQGTMVTVSS

SEQ ID NO: 2289 - protein, 112 aa, synthetic construct
DIVMTQSPLSLPVTPGEPASISCRSSQRLVHSNGNTYLHWYLQKPGQSPRLLIYRVSNRFPGVPDRFSGSGSGTDFTLKISRVEAEDVGVYYCSQSTHVPYTFGQGTKLEIK

SEQ ID NO: 2290 - protein, 8 aa, synthetic construct
GYKFTGFV

SEQ ID NO: 2291 - protein, 17 aa, synthetic construct
ARGNGYNFDGAYRFFDF

SEQ ID NO: 2292 - protein, 5 aa, synthetic construct
GFVMH

SEQ ID NO: 2293 - protein, 15 aa, synthetic construct
GNGYNFDGAYRFFDF

SEQ ID NO: 2294 - protein, 124 aa, synthetic construct
QVQLVQSGAEVKKPGASVKVSCKASGYKFTGFVMHWVRQAPGQGLEWMGFINPYNDDIQSNERFRGRVTMTRDTSISTAYMELSRLRSDDTAVYYCARGNGYNFDGAYRFFDFWGQGTMVTVSS

SEQ ID NO: 2295 - protein, 242 aa, synthetic construct
QVTLKESGPVLVKPTETLTLTCTVSGFSLTAYGVNWVRQPPGKALEWLGMIWGDGNTDYNSALKSRLTISKDNSKSQVVLTMTNMDPVDTATYYCARDRVTATLYAMDYWGQGTLVTVSSGGGGSGGGGSGGGGSDIQMTQSPSSLSASVGDRVTITCSASQGISNYLNWYQQKPGKAVKLLIYYTSSLHSGVPSRFSGSGSGTDYTLTISSLQPEDFATYYCQQYSKLPRTFGGGTKVEIK

SEQ ID NO: 2296 - protein, 245 aa, synthetic construct
EVQLQQSVADLVRPGASLKLSCTASGFNIKSAYMHWVIQRPDQGPECLGRIDPATGKTKYAPKFQAKATITADTSSNTAYLQLSSLTSEDTAIYYCTRSLNWDYGLDYWGQGTSVTVSSGGGGSGGGGSGGGGSDIVLTQSPASLAVSLGQRATISCRASKSVSILGTHLIHWYQQKPGQPPKLLIYAASNLESGVPARFSGSGSETVFTLNIHPVEEEDAATYFCQQSIEDPWTFGGGTKLGIK

SEQ ID NO: 2297 - protein, 251 aa, synthetic construct
QVQLVQSGAEVKKPGASVKVSCKASGYTFTGYVMHWVRQAPGQGLEWMGFINPYNDDIQSNERFRGRVTMTRDTSISTAYMELSRLRSDDTAVYYCARGAGYNFDGAYRFFDFWGQGTMVTVSSGGGGSGGGGSGGGGSDIVMTQSPLSLPVTPGEPASISCRSSQRLVHSNGNTYLHWYLQKPGQSPRLLIYRVSNRFPGVPDRFSGSGSGTDFTLKISRVEAEDVGVYYCSQSTHVPYTFGQGTKLEIK

SEQ ID NO: 2298 - protein, 251 aa, synthetic construct
QVQLVQSGAEVKKPGASVKVSCKASGYKFTGFVMHWVRQAPGQGLEWMGFINPYNDDIQSNERFRGRVTMTRDTSISTAYMELSRLRSDDTAVYYCARGNGYNFDGAYRFFDFWGQGTMVTVSSGGGGSGGGGSGGGGSDIVMTQSPLSLPVTPGEPASISCRSSQRLVHSNGNTYLHWYLQKPGQSPRLLIYRVSNRFPGVPDRFSGSGSGTDFTLKISRVEAEDVGVYYCSQSTHVPYTFGQGTKLEIK

SEQ ID NO: 2299 - protein, 8 aa, synthetic construct
GFAFSRYG

SEQ ID NO: 2300 - protein, 8 aa, synthetic construct
IWYDGSNK

SEQ ID NO: 2301 - protein, 16 aa, synthetic construct
ARGGDFLYYYYYGMDV

SEQ ID NO: 2302 - protein, 9 aa, synthetic construct
QNYNSAPFT

SEQ ID NO: 2303 - protein, 5 aa, synthetic construct
RYGMH

SEQ ID NO: 2304 - protein, 17 aa, synthetic construct
VIWYDGSNKYYADSVKG

SEQ ID NO: 2305 - protein, 14 aa, synthetic construct
GGDFLYYYYYGMDV

SEQ ID NO: 2306 - protein, 11 aa, synthetic construct
RASQGISNYLA

SEQ ID NO: 2307 - protein, 7 aa, synthetic construct
EASTLQS

SEQ ID NO: 2308-2331 - skipped (24 entries)

SEQ ID NO: 2332 - protein, 30 aa, synthetic construct
  REPEAT 1: note = single repeat of G
  VARIANT 1..30: note = up to 29 copies of G repeat may be deleted
GGGGGGGGGGGGGGGGGGGGGGGGGGGGGG

SEQ ID NO: 2333 - protein, 90 aa, synthetic construct
  REPEAT 1..6: note = single repeat of (GxS) wherein x = 1-5
  VARIANT 1..90: note = up to 4 copies of G in each iteration of (GxS) wherein x = 1-5 can be deleted
GGGGGSGGGGGSGGGGGSGGGGGSGGGGGSGGGGGSGGGGGSGGGGGSGGGGGSGGGGGSGGGGGSGGGGGSGGGGGSGGGGGSGGGGGS

SEQ ID NO: 2334 - protein, 90 aa, synthetic construct
  REPEAT 1..6: note = single repeat of (SxG) wherein x = 1-5
  VARIANT 1..90: note = up to 4 copies of S in each iteration of (SxG) wherein x = 1-5 can be deleted
SSSSSGSSSSSGSSSSSGSSSSSGSSSSSGSSSSSGSSSSSGSSSSSGSSSSSGSSSSSGSSSSSGSSSSSGSSSSSGSSSSSGSSSSSG

SEQ ID NO: 2335 - protein, 25 aa, synthetic construct
  REPEAT 1..5: note = single repeat of GSGGS
  VARIANT 1..25: note = up to 4 copies of GSGGS repeat may be deleted
GSGGSGSGGSGSGGSGSGGSGSGGS

SEQ ID NO: 2336 - protein, 25 aa, synthetic construct
  REPEAT 1..5: note = single repeat of GGGGS
  VARIANT 1..25: note = up to 4 copies of GGGGS repeat may be deleted
GGGGSGGGGSGGGGSGGGGSGGGGS

SEQ ID NO: 2337 - protein, 5 aa, synthetic construct
GSGSG

SEQ ID NO: 2338 - protein, 7 aa, synthetic construct
GGSGGGG

SEQ ID NO: 2339 - protein, 10 aa, synthetic construct
GGGGSGGGGS

SEQ ID NO: 2340 - protein, 20 aa, synthetic construct
GGGGSGGGGSGGGGSGGGGS

SEQ ID NO: 2341 - protein, 25 aa, synthetic construct
GGGGSGGGGSGGGGSGGGGSGGGGS

SEQ ID NO: 2342 - protein, 482 aa, synthetic construct
QVQLVQSGAEVKKPGASVKVSCKASGYTFTGYVMHWVRQAPGQGLEWMGFINPYNDDIQSNERFRGRVTMTRDTSISTAYMELSRLRSDDTAVYYCARGAGYNFDGAYRFFDFWGQGTMVTVSSGGGGSGGGGSGGGGSDIVMTQSPLSLPVTPGEPASISCRSSQRLVHSNGNTYLHWYLQKPGQSPRLLIYRVSNRFPGVPDRFSGSGSGTDFTLKISRVEAEDVGVYYCSQSTHVPYTFGQGTKLEIKGGGGSQVQLVESGGGVVQPGRSLRLSCAASGFAFSRYGMHWVRQAPGKGLEWVAVIWYDGSNKYYADSVKGRFTISRDNSKNTQYLQMNSLRAEDTAVYYCARGGDFLYYYYYGMDVWGQGTTVTVSSASTKGPSVFPLAPSSKSTSGGTAALGCLVKDYFPEPVTVSWNSGALTSGVHTFPAVLQSSGLYSLSSVVTVPSSSLGTQTYICNVNHKPSNTKVDKKVEPKSC

SEQ ID NO: 2343 - protein, 470 aa, synthetic construct
QVQLVQSGAEVKKPGASVKVSCKASGYTFTGYVMHWVRQAPGQGLEWMGFINPYNDDIQSNERFRGRVTMTRDTSISTAYMELSRLRSDDTAVYYCARGAGYNFDGAYRFFDFWGQGTMVTVSSGGGGSGGGGSGGGGSDIVMTQSPLSLPVTPGEPASISCRSSQRLVHSNGNTYLHWYLQKPGQSPRLLIYRVSNRFPGVPDRFSGSGSGTDFTLKISRVEAEDVGVYYCSQSTHVPYTFGQGTKLEIKGGGGSDIQMTQSPSSLSASVGDRVTITCRASQGISNYLAWYQQKTGKVPKFLIYEASTLQSGVPSRFSGGGSGTDFTLTISSLQPEDVATYYCQNYNSAPFTFGPGTKVDIKRTVAAPSVFIFPPSDEQLKSGTASVVCLLNNFYPREAKVQWKVDNALQSGNSQESVTEQDSKDSTYSLSSTLTLSKADYEKHKVYACEVTHQGLSSPVTKSFNRGEC

SEQ ID NO: 2344 - protein, 482 aa, synthetic construct
QVQLVQSGAEVKKPGASVKVSCKASGYKFTGFVMHWVRQAPGQGLEWMGFINPYNDDIQSNERFRGRVTMTRDTSISTAYMELSRLRSDDTAVYYCARGNGYNFDGAYRFFDFWGQGTMVTVSSGGGGSGGGGSGGGGSDIVMTQSPLSLPVTPGEPASISCRSSQRLVHSNGNTYLHWYLQKPGQSPRLLIYRVSNRFPGVPDRFSGSGSGTDFTLKISRVEAEDVGVYYCSQSTHVPYTFGQGTKLEIKGGGGSQVQLVESGGGVVQPGRSLRLSCAASGFAFSRYGMHWVRQAPGKGLEWVAVIWYDGSNKYYADSVKGRFTISRDNSKNTQYLQMNSLRAEDTAVYYCARGGDFLYYYYYGMDVWGQGTTVTVSSASTKGPSVFPLAPSSKSTSGGTAALGCLVKDYFPEPVTVSWNSGALTSGVHTFPAVLQSSGLYSLSSVVTVPSSSLGTQTYICNVNHKPSNTKVDKKVEPKSC

SEQ ID NO: 2345 - protein, 470 aa, synthetic construct
QVQLVQSGAEVKKPGASVKVSCKASGYKFTGFVMHWVRQAPGQGLEWMGFINPYNDDIQSNERFRGRVTMTRDTSISTAYMELSRLRSDDTAVYYCARGNGYNFDGAYRFFDFWGQGTMVTVSSGGGGSGGGGSGGGGSDIVMTQSPLSLPVTPGEPASISCRSSQRLVHSNGNTYLHWYLQKPGQSPRLLIYRVSNRFPGVPDRFSGSGSGTDFTLKISRVEAEDVGVYYCSQSTHVPYTFGQGTKLEIKGGGGSDIQMTQSPSSLSASVGDRVTITCRASQGISNYLAWYQQKTGKVPKFLIYEASTLQSGVPSRFSGGGSGTDFTLTISSLQPEDVATYYCQNYNSAPFTFGPGTKVDIKRTVAAPSVFIFPPSDEQLKSGTASVVCLLNNFYPREAKVQWKVDNALQSGNSQESVTEQDSKDSTYSLSSTLTLSKADYEKHKVYACEVTHQGLSSPVTKSFNRGEC

SEQ ID NO: 2346 - protein, 472 aa, synthetic construct
QVQLVQSGAEVKKPGSSVKVSCKASGYSFTTYYIHWVRQAPGQGLEWMGWFFPGSGNIKYNEKFKGRVTITADTSTSTAYMELSSLRSEDTAVYYCAGSYYSYDVLDYWGQGTTVTVSSGGGGSGGGGSGGGGSDIQMTQSPSFLSASVGDRVTITCKASQNVGINVVWHQQKPGKAPKALIYSSSHRYSGVPSRFSGSGSGTEFTLTISSLQPEDFATYFCQQFKSYPLTFGQGTKLEIKGGGGSQVQLVESGGGVVQPGRSLRLSCAASGFAFSRYGMHWVRQAPGKGLEWVAVIWYDGSNKYYADSVKGRFTISRDNSKNTQYLQMNSLRAEDTAVYYCARGGDFLYYYYYGMDVWGQGTTVTVSSASTKGPSVFPLAPSSKSTSGGTAALGCLVKDYFPEPVTVSWNSGALTSGVHTFPAVLQSSGLYSLSSVVTVPSSSLGTQTYICNVNHKPSNTKVDKKVEPKSC

SEQ ID NO: 2347 - protein, 460 aa, synthetic construct
QVQLVQSGAEVKKPGSSVKVSCKASGYSFTTYYIHWVRQAPGQGLEWMGWFFPGSGNIKYNEKFKGRVTITADTSTSTAYMELSSLRSEDTAVYYCAGSYYSYDVLDYWGQGTTVTVSSGGGGSGGGGSGGGGSDIQMTQSPSFLSASVGDRVTITCKASQNVGINVVWHQQKPGKAPKALIYSSSHRYSGVPSRFSGSGSGTEFTLTISSLQPEDFATYFCQQFKSYPLTFGQGTKLEIKGGGGSDIQMTQSPSSLSASVGDRVTITCRASQGISNYLAWYQQKTGKVPKFLIYEASTLQSGVPSRFSGGGSGTDFTLTISSLQPEDVATYYCQNYNSAPFTFGPGTKVDIKRTVAAPSVFIFPPSDEQLKSGTASVVCLLNNFYPREAKVQWKVDNALQSGNSQESVTEQDSKDSTYSLSSTLTLSKADYEKHKVYACEVTHQGLSSPVTKSFNRGEC

SEQ ID NO: 2348 - protein, 469 aa, synthetic construct
EVQLVESGGGLVQPGGSLRLSCAASGFTFSNFGMHWVRQAPGKGLEWVSYISSGSSTIYYADTLKGRFTISRDNSKNTLYLQMNSLRAEDTAVYYCARRGEGAMDYWGQGTTVTVSSGGGGSGGGGSGGGGSDNQLTQSPSFLSASVGDRVTITCRASSSVNYIYWYQQKPGKAPKLLIYYTSNLAPGVPSRFSGSGSGNEYTLTISSLQPEDFATYYCQQFTSSPFTFGQGTKLEIKGGGGSQVQLVESGGGVVQPGRSLRLSCAASGFAFSRYGMHWVRQAPGKGLEWVAVIWYDGSNKYYADSVKGRFTISRDNSKNTQYLQMNSLRAEDTAVYYCARGGDFLYYYYYGMDVWGQGTTVTVSSASTKGPSVFPLAPSSKSTSGGTAALGCLVKDYFPEPVTVSWNSGALTSGVHTFPAVLQSSGLYSLSSVVTVPSSSLGTQTYICNVNHKPSNTKVDKKVEPKSC

SEQ ID NO: 2349 - protein, 457 aa, synthetic construct
EVQLVESGGGLVQPGGSLRLSCAASGFTFSNFGMHWVRQAPGKGLEWVSYISSGSSTIYYADTLKGRFTISRDNSKNTLYLQMNSLRAEDTAVYYCARRGEGAMDYWGQGTTVTVSSGGGGSGGGGSGGGGSDNQLTQSPSFLSASVGDRVTITCRASSSVNYIYWYQQKPGKAPKLLIYYTSNLAPGVPSRFSGSGSGNEYTLTISSLQPEDFATYYCQQFTSSPFTFGQGTKLEIKGGGGSDIQMTQSPSSLSASVGDRVTITCRASQGISNYLAWYQQKTGKVPKFLIYEASTLQSGVPSRFSGGGSGTDFTLTISSLQPEDVATYYCQNYNSAPFTFGPGTKVDIKRTVAAPSVFIFPPSDEQLKSGTASVVCLLNNFYPREAKVQWKVDNALQSGNSQESVTEQDSKDSTYSLSSTLTLSKADYEKHKVYACEVTHQGLSSPVTKSFNRGEC

SEQ ID NO: 2350 - protein, 473 aa, synthetic construct
QVTLKESGPVLVKPTETLTLTCTVSGFSLTAYGVNWVRQPPGKALEWLGMIWGDGNTDYNSALKSRLTISKDNSKSQVVLTMTNMDPVDTATYYCARDRVTATLYAMDYWGQGTLVTVSSGGGGSGGGGSGGGGSDIQMTQSPSSLSASVGDRVTITCSASQGISNYLNWYQQKPGKAVKLLIYYTSSLHSGVPSRFSGSGSGTDYTLTISSLQPEDFATYYCQQYSKLPRTFGGGTKVEIKGGGGSQVQLVESGGGVVQPGRSLRLSCAASGFAFSRYGMHWVRQAPGKGLEWVAVIWYDGSNKYYADSVKGRFTISRDNSKNTQYLQMNSLRAEDTAVYYCARGGDFLYYYYYGMDVWGQGTTVTVSSASTKGPSVFPLAPSSKSTSGGTAALGCLVKDYFPEPVTVSWNSGALTSGVHTFPAVLQSSGLYSLSSVVTVPSSSLGTQTYICNVNHKPSNTKVDKKVEPKSC

SEQ ID NO: 2351 - protein, 461 aa, synthetic construct
QVTLKESGPVLVKPTETLTLTCTVSGFSLTAYGVNWVRQPPGKALEWLGMIWGDGNTDYNSALKSRLTISKDNSKSQVVLTMTNMDPVDTATYYCARDRVTATLYAMDYWGQGTLVTVSSGGGGSGGGGSGGGGSDIQMTQSPSSLSASVGDRVTITCSASQGISNYLNWYQQKPGKAVKLLIYYTSSLHSGVPSRFSGSGSGTDYTLTISSLQPEDFATYYCQQYSKLPRTFGGGTKVEIKGGGGSDIQMTQSPSSLSASVGDRVTITCRASQGISNYLAWYQQKTGKVPKFLIYEASTLQSGVPSRFSGGGSGTDFTLTISSLQPEDVATYYCQNYNSAPFTFGPGTKVDIKRTVAAPSVFIFPPSDEQLKSGTASVVCLLNNFYPREAKVQWKVDNALQSGNSQESVTEQDSKDSTYSLSSTLTLSKADYEKHKVYACEVTHQGLSSPVTKSFNRGEC

SEQ ID NO: 2352 - protein, 476 aa, synthetic construct
EVQLQQSVADLVRPGASLKLSCTASGFNIKSAYMHWVIQRPDQGPECLGRIDPATGKTKYAPKFQAKATITADTSSNTAYLQLSSLTSEDTAIYYCTRSLNWDYGLDYWGQGTSVTVSSGGGGSGGGGSGGGGSDIVLTQSPASLAVSLGQRATISCRASKSVSILGTHLIHWYQQKPGQPPKLLIYAASNLESGVPARFSGSGSETVFTLNIHPVEEEDAATYFCQQSIEDPWTFGGGTKLGIKGGGGSQVQLVESGGGVVQPGRSLRLSCAASGFAFSRYGMHWVRQAPGKGLEWVAVIWYDGSNKYYADSVKGRFTISRDNSKNTQYLQMNSLRAEDTAVYYCARGGDFLYYYYYGMDVWGQGTTVTVSSASTKGPSVFPLAPSSKSTSGGTAALGCLVKDYFPEPVTVSWNSGALTSGVHTFPAVLQSSGLYSLSSVVTVPSSSLGTQTYICNVNHKPSNTKVDKKVEPKSC

SEQ ID NO: 2353 - protein, 464 aa, synthetic construct
EVQLQQSVADLVRPGASLKLSCTASGFNIKSAYMHWVIQRPDQGPECLGRIDPATGKTKYAPKFQAKATITADTSSNTAYLQLSSLTSEDTAIYYCTRSLNWDYGLDYWGQGTSVTVSSGGGGSGGGGSGGGGSDIVLTQSPASLAVSLGQRATISCRASKSVSILGTHLIHWYQQKPGQPPKLLIYAASNLESGVPARFSGSGSETVFTLNIHPVEEEDAATYFCQQSIEDPWTFGGGTKLGIKGGGGSDIQMTQSPSSLSASVGDRVTITCRASQGISNYLAWYQQKTGKVPKFLIYEASTLQSGVPSRFSGGGSGTDFTLTISSLQPEDVATYYCQNYNSAPFTFGPGTKVDIKRTVAAPSVFIFPPSDEQLKSGTASVVCLLNNFYPREAKVQWKVDNALQSGNSQESVTEQDSKDSTYSLSSTLTLSKADYEKHKVYACEVTHQGLSSPVTKSFNRGEC

SEQ ID NO: 2354-2392 - skipped (39 entries)

SEQ ID NO: 2393 - protein, 20 aa, synthetic construct
ASPAAPAPASPAAPAPSAPA

SEQ ID NO: 2394 - protein, 20 aa, synthetic construct
AAPASPAPAAPSAPAPAAPS

SEQ ID NO: 2395 - protein, 20 aa, synthetic construct
APSSPSPSAPSSPSPASPSS

SEQ ID NO: 2396 - protein, 19 aa, synthetic construct
APSSPSPSAPSSPSPASPS

SEQ ID NO: 2397 - protein, 20 aa, synthetic construct
SSPSAPSPSSPASPSPSSPA

SEQ ID NO: 2398 - protein, 24 aa, synthetic construct
AASPAAPSAPPAAASPAAPSAPPA

SEQ ID NO: 2399 - protein, 20 aa, synthetic construct
ASAAAPAAASAAASAPSAAA

SEQ ID NO: 2400 - protein, 100 aa, synthetic construct
  REPEAT 1: note = single repeat of G
  VARIANT 1..100: note = up to 99 copies of G repeat may be deleted
GGGGGGGGGGGGGGGGGGGGGGGGGGGGGGGGGGGGGGGGGGGGGGGGGGGGGGGGGGGGGGGGGGGGGGGGGGGGGGGGGGGGGGGGGGGGGGGGGGGG

SEQ ID NO: 2401 - protein, 500 aa, synthetic construct
  REPEAT 1..5: note = single repeat of GGGGS
  VARIANT 1..500: note = up to 99 copies of GGGGS repeat may be deleted
GGGGSGGGGSGGGGSGGGGSGGGGSGGGGSGGGGSGGGGSGGGGSGGGGSGGGGSGGGGSGGGGSGGGGSGGGGSGGGGSGGGGSGGGGSGGGGSGGGGSGGGGSGGGGSGGGGSGGGGSGGGGSGGGGSGGGGSGGGGSGGGGSGGGGSGGGGSGGGGSGGGGSGGGGSGGGGSGGGGSGGGGSGGGGSGGGGSGGGGSGGGGSGGGGSGGGGSGGGGSGGGGSGGGGSGGGGSGGGGSGGGGSGGGGSGGGGSGGGGSGGGGSGGGGSGGGGSGGGGSGGGGSGGGGSGGGGSGGGGSGGGGSGGGGSGGGGSGGGGSGGGGSGGGGSGGGGSGGGGSGGGGSGGGGSGGGGSGGGGSGGGGSGGGGSGGGGSGGGGSGGGGSGGGGSGGGGSGGGGSGGGGSGGGGSGGGGSGGGGSGGGGSGGGGSGGGGSGGGGSGGGGSGGGGSGGGGSGGGGSGGGGSGGGGSGGGGSGGGGSGGGGSGGGGSGGGGSGGGGS

SEQ ID NO: 2402 - protein, 501 aa, synthetic construct
  REPEAT 2..6: note = single repeat of GGGGS
  VARIANT 2..501: note = up to 99 copies of GGGGS repeat may be deleted
SGGGGSGGGGSGGGGSGGGGSGGGGSGGGGSGGGGSGGGGSGGGGSGGGGSGGGGSGGGGSGGGGSGGGGSGGGGSGGGGSGGGGSGGGGSGGGGSGGGGSGGGGSGGGGSGGGGSGGGGSGGGGSGGGGSGGGGSGGGGSGGGGSGGGGSGGGGSGGGGSGGGGSGGGGSGGGGSGGGGSGGGGSGGGGSGGGGSGGGGSGGGGSGGGGSGGGGSGGGGSGGGGSGGGGSGGGGSGGGGSGGGGSGGGGSGGGGSGGGGSGGGGSGGGGSGGGGSGGGGSGGGGSGGGGSGGGGSGGGGSGGGGSGGGGSGGGGSGGGGSGGGGSGGGGSGGGGSGGGGSGGGGSGGGGSGGGGSGGGGSGGGGSGGGGSGGGGSGGGGSGGGGSGGGGSGGGGSGGGGSGGGGSGGGGSGGGGSGGGGSGGGGSGGGGSGGGGSGGGGSGGGGSGGGGSGGGGSGGGGSGGGGSGGGGSGGGGSGGGGSGGGGSGGGGSGGGGSGGGGS

SEQ ID NO: 2403-2409 - skipped (7 entries)

SEQ ID NO: 2410 - protein, 95 aa, Macaca fascicularis; identical to SEQ ID NO: 224

SEQ ID NO: 2411 - protein, 95 aa, Macaca fascicularis; identical to SEQ ID NO: 225

SEQ ID NO: 2412 - protein, 95 aa, Macaca fascicularis; identical to SEQ ID NO: 226

SEQ ID NO: 2413 - protein, 95 aa, Macaca fascicularis; identical to SEQ ID NO: 227

SEQ ID NO: 2414 - protein, 96 aa, Homo sapiens; identical to SEQ ID NO: 228

SEQ ID NO: 2415 - protein, 96 aa, Macaca fascicularis; identical to SEQ ID NO: 229

SEQ ID NO: 2416 - protein, 5 aa, synthetic construct
LGYIH

SEQ ID NO: 2417 - protein, 5 aa, synthetic construct
LTYIH

SEQ ID NO: 2418 - protein, 5 aa, synthetic construct
NWYIH

SEQ ID NO: 2419 - protein, 5 aa, synthetic construct
TYYIH

SEQ ID NO: 2420 - protein, 5 aa, synthetic construct
KTYIH

SEQ ID NO: 2421 - protein, 5 aa, synthetic construct
KIYIH

SEQ ID NO: 2422 - protein, 5 aa, synthetic construct
KFYIH

SEQ ID NO: 2423 - protein, 5 aa, synthetic construct
DFYIH

SEQ ID NO: 2424 - protein, 5 aa, synthetic construct
LWYIH

SEQ ID NO: 2425 - protein, 11 aa, synthetic construct
RIFPGSGNIKY

SEQ ID NO: 2426 - protein, 11 aa, synthetic construct
WFFPGSGNTKY

SEQ ID NO: 2427 - protein, 11 aa, synthetic construct
WFSPGSGNTKY

SEQ ID NO: 2428 - protein, 11 aa, synthetic construct
WFSAGSGNTKY

SEQ ID NO: 2429 - protein, 11 aa, synthetic construct
RVYPGSGNTKY

SEQ ID NO: 2430 - protein, 11 aa, synthetic construct
RVSPGSGNTKY

SEQ ID NO: 2431 - protein, 11 aa, synthetic construct
RISPGSGNTKY

SEQ ID NO: 2432 - protein, 11 aa, synthetic construct
RVSAGSGNVKY

SEQ ID NO: 2433 - protein, 11 aa, synthetic construct
RVSPGSGNVKY

SEQ ID NO: 2434 - protein, 11 aa, synthetic construct
RISPGSGNVKY

SEQ ID NO: 2435 - protein, 11 aa, synthetic construct
RIFPGSGNTKY

SEQ ID NO: 2436 - protein, 11 aa, synthetic construct
RIFPGSGNVKY

SEQ ID NO: 2437 - protein, 11 aa, synthetic construct
RISAGSGNVKY

SEQ ID NO: 2438 - protein, 11 aa, synthetic construct
RISAGSGNTKY

SEQ ID NO: 2439 - protein, 11 aa, synthetic construct
RIYPGSGNVKY

SEQ ID NO: 2440 - protein, 11 aa, synthetic construct
RVSAGSGNTKY

SEQ ID NO: 2441 - protein, 11 aa, synthetic construct
RIFAGSGNTKY

SEQ ID NO: 2442 - protein, 11 aa, synthetic construct
RISAGSGNIKY

SEQ ID NO: 2443 - protein, 11 aa, synthetic construct
RIFAGSGNVKY

SEQ ID NO: 2444 - protein, 11 aa, synthetic construct
RVYPGSGSYRY

SEQ ID NO: 2445 - protein, 11 aa, synthetic construct
RVFAGSGSYRY

SEQ ID NO: 2446 - protein, 11 aa, synthetic construct
RVFAGSGNTKY

SEQ ID NO: 2447 - protein, 10 aa, synthetic construct
SIYSAGVLDY

SEQ ID NO: 2448 - protein, 11 aa, synthetic construct
KASQNVENKVA

SEQ ID NO: 2449 - protein, 11 aa, synthetic construct
KASQNVDNKVA

SEQ ID NO: 2450 - protein, 11 aa, synthetic construct
KASQNVDNRVA

SEQ ID NO: 2451 - protein, 11 aa, synthetic construct
KASQNVEDRVA

SEQ ID NO: 2452 - protein, 11 aa, synthetic construct
KASQNVDDRVA

SEQ ID NO: 2453 - protein, 11 aa, synthetic construct
KASQNVGDRVA

SEQ ID NO: 2454 - protein, 11 aa, synthetic construct
KASQNVEDKVA

SEQ ID NO: 2455 - protein, 11 aa, synthetic construct
KASQNVADRVA

SEQ ID NO: 2456 - protein, 11 aa, synthetic construct
KASQNVGNRVA

SEQ ID NO: 2457 - protein, 7 aa, synthetic construct
SSSHRYS

SEQ ID NO: 2458 - protein, 8 aa, synthetic construct
GGTFDKTY

SEQ ID NO: 2459 - protein, 8 aa, synthetic construct
GGTFKLTY

SEQ ID NO: 2460 - protein, 8 aa, synthetic construct
GGTFRLTY

SEQ ID NO: 2461 - protein, 8 aa, synthetic construct
GHDFDKFY

SEQ ID NO: 2462 - protein, 8 aa, synthetic construct
GHDFDKTY

SEQ ID NO: 2463 - protein, 8 aa, synthetic construct
GHDFHLWY

SEQ ID NO: 2464 - protein, 8 aa, synthetic construct
GHDFKLTY

SEQ ID NO: 2465 - protein, 8 aa, synthetic construct
GHDFRDFY

SEQ ID NO: 2466 - protein, 8 aa, synthetic construct
GHDFRLTY

SEQ ID NO: 2467 - protein, 8 aa, synthetic construct
GTDFDKFY

SEQ ID NO: 2468 - protein, 8 aa, synthetic construct
GTDFDKIY

SEQ ID NO: 2469 - protein, 8 aa, synthetic construct
GTDFDKTY

SEQ ID NO: 2470 - protein, 8 aa, synthetic construct
GTDFHLWY

SEQ ID NO: 2471 - protein, 8 aa, synthetic construct
GTDFKLTY

SEQ ID NO: 2472 - protein, 8 aa, synthetic construct
GTDFRLTY

SEQ ID NO: 2473 - protein, 8 aa, synthetic construct
GYSFHNWY

SEQ ID NO: 2474 - protein, 8 aa, synthetic construct
GYSFRLTY

SEQ ID NO: 2475 - protein, 8 aa, synthetic construct
GYSFTLGY

SEQ ID NO: 2476 - protein, 8 aa, synthetic construct
GYSFTTYY

SEQ ID NO: 2477 - protein, 8 aa, synthetic construct
IFPGSGNI

SEQ ID NO: 2478 - protein, 8 aa, synthetic construct
FFPGSGNT

SEQ ID NO: 2479 - protein, 8 aa, synthetic construct
FSPGSGNT

SEQ ID NO: 2480 - protein, 8 aa, synthetic construct
FSAGSGNT

SEQ ID NO: 2481 - protein, 8 aa, synthetic construct
VYPGSGNT

SEQ ID NO: 2482 - protein, 8 aa, synthetic construct
VSPGSGNT

SEQ ID NO: 2483 - protein, 8 aa, synthetic construct
ISPGSGNT

SEQ ID NO: 2484 - protein, 8 aa, synthetic construct
VSAGSGNV

SEQ ID NO: 2485 - protein, 8 aa, synthetic construct
VSPGSGNV

SEQ ID NO: 2486 - protein, 8 aa, synthetic construct
ISPGSGNV

SEQ ID NO: 2487 - protein, 8 aa, synthetic construct
IFPGSGNT

SEQ ID NO: 2488 - protein, 8 aa, synthetic construct
IFPGSGNV

SEQ ID NO: 2489 - protein, 8 aa, synthetic construct
ISAGSGNV

SEQ ID NO: 2490 - protein, 8 aa, synthetic construct
ISAGSGNT

SEQ ID NO: 2491 - protein, 8 aa, synthetic construct
IYPGSGNV

SEQ ID NO: 2492 - protein, 8 aa, synthetic construct
VSAGSGNT

SEQ ID NO: 2493 - protein, 8 aa, synthetic construct
IFAGSGNT

SEQ ID NO: 2494 - protein, 8 aa, synthetic construct
ISAGSGNI

SEQ ID NO: 2495 - protein, 8 aa, synthetic construct
IFAGSGNV

SEQ ID NO: 2496 - protein, 8 aa, synthetic construct
VYPGSGSY

SEQ ID NO: 2497 - protein, 8 aa, synthetic construct
VFAGSGSY

SEQ ID NO: 2498 - protein, 8 aa, synthetic construct
VFAGSGNT

SEQ ID NO: 2499 - protein, 10 aa, synthetic construct
SIYSAGVLDY

SEQ ID NO: 2500 - protein, 6 aa, synthetic construct
QNVENK

SEQ ID NO: 2501 - protein, 6 aa, synthetic construct
QNVDNK

SEQ ID NO: 2502 - protein, 6 aa, synthetic construct
QNVDNR

SEQ ID NO: 2503 - protein, 6 aa, synthetic construct
QNVEDR

SEQ ID NO: 2504 - protein, 6 aa, synthetic construct
QNVDDR

SEQ ID NO: 2505 - protein, 6 aa, synthetic construct
QNVGDR

SEQ ID NO: 2506 - protein, 6 aa, synthetic construct
QNVEDK

SEQ ID NO: 2507 - protein, 6 aa, synthetic construct
QNVADR

SEQ ID NO: 2508 - protein, 6 aa, synthetic construct
QNVGNR

SEQ ID NO: 2509 - protein, 115 aa, synthetic construct
EVQLVESGGGLVQPGNSLRLSCAASGFTFSKFGMSWVRQAPGKGLEWVSSISGSGRDTLYADSVKGRFTISRDNAKTTLYLQMNSLRPEDTAVYYCTIGGSLSVSSQGTLVTVSS

SEQ ID NO: 2510 - protein, 115 aa, synthetic construct [sequence omitted]

SEQ ID NO: 2511 - protein, 124 aa, synthetic construct
EVQLVESGGGLVQPGGSLRLSCAASGSTFYTAVMGWVRQAPGKGLEWVAAIRWTALTTSYADSVKGRFTISRDGAKTTLYLQMNSLRPEDTAVYYCAARGTLGLFTTADSYDYWGQGTLVTVSS

SEQ ID NO: 2512 - protein, 119 aa, synthetic construct
QVQLVQSGAEVKKPGSSVKVSCKASGYSFTLYYIHWVRQAPGQCLEWMGWFFPGSGNIKYNEKFKGRVTITADTSTSTAYMELSSLRSEDTAVYYCAASYYSFDVLDYWGQGTTVTVSS

SEQ ID NO: 2513 - protein, 119 aa, synthetic construct
QVQLVQSGAEVKKPGSSVKVSCKASGYSFTTYYIHWVRQAPGQCLEWMGWFFPRSGNIKYNEKFKGRVTITADTSTSTAYMELSSLRSEDTAVYYCAASYYSFDVLDYWGQGTTVTVSS

SEQ ID NO: 2514 - protein, 107 aa, synthetic construct
DIQMTQSPSFLSASVGDRVTITCKASQNVGIRVVWHQQKPGKAPKALIYSSSHRYSGVPSRFSGSGSGTEFTLTISSLQPEDFATYFCQQFKSYPITFGCGTKLEIK

SEQ ID NO: 2515 - protein, 6 aa, synthetic construct
KTHTCP

SEQ ID NO: 2516 - protein, 16 aa, synthetic construct
GGGGSGGGGSKTHTCP

SEQ ID NO: 2517 - protein, 7 aa, synthetic construct
DKTHTCP

SEQ ID NO: 2518 - protein, 10 aa, synthetic construct
DKTHTCPPCP

SEQ ID NO: 2519 - protein, 15 aa, synthetic construct
EPKSCDKTHTCPPCP

SEQ ID NO: 2520 - protein, 12 aa, synthetic construct
ERKCCVECPPCP

SEQ ID NO: 2521 - protein, 17 aa, synthetic construct
ELKTPLGDTTHTCPRCP

SEQ ID NO: 2522 - protein, 15 aa, synthetic construct
EPKSCDTPPPCPRCP

SEQ ID NO: 2523 - protein, 12 aa, synthetic construct
ESKYGPPCPSCP